(19) United States
(12) Patent Application Publication
(10) Pub. No.: US 2022/0127311 A1
(43) Pub. Date: Apr. 28, 2022

(54) CELL FACTORIES FOR IMPROVED PRODUCTION OF COMPOUNDS AND PROTEINS DEPENDENT ON IRON SULFUR CLUSTERS

(71) Applicant: BIOSYNTIA APS, Copenhagen (DK)

(72) Inventors: Hans Jasper GENEE, Copenhagen (DK); Carlos G. ACEVE-DO-ROCHA, Copenhagen (DK); Anne Pihl BALI, Copenhagen (DK); Lasse Holm LAURIDSEN, Copenhagen (DK); Luisa GRONENBERG, Copenhagen (DK); Nils MYLING-PETERSEN, Copenhagen (DK)

(73) Assignee: BIOSYNTIA APS, Copenhagen, OT (DK)

(21) Appl. No.: 17/423,457

(22) PCT Filed: Jan. 15, 2020
(86) PCT No.: PCT/EP2020/050950

§ 371 Date: Jul. 15, 2021

(30) Foreign Application Priority Data
Jan. 16, 2019 (EP) 19152181.4

(51) Int. Cl. C07K 14/245; C12N 15/70; C12N 9/10; C12N 9/88; C12N 9/02; C12N 9/90; C12N 9/00; C12N 9/16; C12N 9/24

(52) U.S. Cl. CPC C07K 14/245; C12Y 603/01005; C12N 9/13; C12N 9/88; C12N 9/0008; C12N 9/90; C12N 9/1085; C12N 9/001; C12N 9/1077; C12N 9/93; C12N 9/16; C12N 9/2497; C12Y 208/01006; C12Y 208/01008; C12Y 401/99017; C12Y 401/99019; C12Y 102/0107; C12Y 103/05003; C12Y 104/03016; C12Y 204/02019; C12Y 205/01061; C12Y 207/07018; C12Y 301/03002; C12Y 302/02004; C12Y 306/01022; C12Y 504/03008; C12N 15/70

(57) ABSTRACT

The invention relates to a genetically modified prokaryotic cell capable of improved iron-sulfur cluster delivery, characterized by a modified gene encoding a mutant Iron Sulfur Cluster Regulator (IscR) and one or more transgenes or upregulated endogenous genes encoding iron-sulfur (Fe—S) cluster polypeptides or proteins that catalyze complex radical-mediated molecular rearrangements, electron transfer, radical or non-redox reactions, sulfur donation or perform regulatory functions. The prokaryotic cells are characterized by enhanced activity of these iron-sulfur (Fe—S) cluster polypeptides, enhancing their respective functional capacity, and facilitating enhanced yields of compounds in free and protein-bound forms, including heme, hemoproteins, tetrapyrroles, B vitamins, amino acids, δ-aminolevulinic acid, biofuels, isoprenoids, pyrroloquinoline quinone, ammonia, indigo, or their precursors, whose biosynthesis depends on their activity. The invention further relates to a method for producing said compounds or their precursors using the genetically modified prokaryotic cell of the invention, and the use of the genetically modified prokaryotic cell.

### Cross-Reference to Related Applications

[0001] This is a national phase application of International Application No. PCT/EP2020/050950, filed 15 Jan. 2020, which claims the benefit of European Patent Application No. 19152181.4, filed 16 Jan. 2019, the disclosures of which are incorporated, in their entireties, by this reference.

### FIELD OF THE INVENTION

### Sequence Listing

[0002] The content of the Sequence Listing submitted electronically herewith (name: 113322-0003_Sequence_Listing_27122021.txt); size 1,100,758 bytes; and date of creation: Dec. 27, 2021) is hereby incorporated by reference in its entirety.

[0003] The invention relates to a genetically modified prokaryotic cell capable of improved iron-sulfur cluster delivery, characterized by a modified gene encoding a mutant Iron Sulfur Cluster Regulator (IscR) as well as one or more transgenes or upregulated endogenous genes encoding iron-sulfur (Fe—S) cluster polypeptides that catalyze complex radical-mediated molecular rearrangements, electron transfer, radical or non-redox reactions, sulfur donation or perform regulatory functions. One example are radical SAM enzymes, which are involved in the biosynthesis of vitamins, cofactors, antibiotics and natural products, metalloprotein cluster formation, enzyme activation as well as amino acid, nucleic acid and sugar post-transcriptional and post-translational modification like methylation. Protein production and metabolic pathways for the synthesis of a wide range of biological compounds are dependent on their Fe—S clusters. Prokaryotic cells of the invention are characterized by enhanced activity of these iron-sulfur (Fe—S) cluster polypeptides, thereby enhancing their respective functional capacity, as well as facilitating enhanced yields of diverse compounds, including heme, δ-aminolevulinic acid, amino acids (glutamate and branched-chain amino acids), vitamins (B₃, B₅ and B₁₂ derivatives), biofuels, isoprenoids, pyrroloquinoline quinone, ammonia, indigo or their precursors, as well as proteins containing said compounds in protein-bound form (tetrapyrrole proteins, hemoproteins, quinoproteins and quinohemoproteins); and whose biosynthesis depends on their activity. The invention further relates to a method for producing each of said compounds, or their precursors using the genetically modified prokaryotic cell of the invention; as well as the use of the genetically modified prokaryotic cell.

### BACKGROUND OF THE INVENTION

[0004] The production of a wide range of compounds (such as vitamins, pharmaceuticals, food supplements, flavors, fragrances, biofuels, fertilizers, and dyes) currently relies on chemical synthesis, which is costly. Biosynthetic methods for their manufacture would provide an alternative, more cost-effective means for meeting current and future needs. Biosynthetic pathways suitable for synthesis of many such compounds are dependent on one or more iron-sulfur (Fe—S) cluster proteins. Development of cell factories tailor-made for the production of those compounds whose biosynthesis depends on such pathways include: Biotin (also known as vitamin B₇ or vitamin H), vitamin B₃ (NAD, NR, and NMN), cobalamin (also known as vitamin B₁₂) and pantothenate (vitamin B₅), and vitamin K are essential dietary vitamins for humans, because in common with other metazoans, they cannot produce biotin, nicotinamide-derived vitamins or cobalamin.

[0005] Heme is a member of the tetrapyrrole family, encompassing several important molecules of diverse metabolic functions (e.g. vitamin B₁₂, chlorophyll, heme, siroheme, chlorophyll, and cofactor F430). Heme plays an essential role in both prokaryotes and eukaryotes for heme-containing proteins. Hemoproteins are involved in enzymatic reactions (e.g. cytochrome P450, cytochrome c oxidase, peroxidase, ligninase, catalase, tryptophan 2,3-dioxygenase, nitric oxide synthase), oxygen transport (e.g. myoglobin, hemoglobin, neuroglobin, cytoglobin and leghemoglobin) and electron transport (e.g. cytochromes in respiratory chain). Heme and hemoproteins find various applications such as in iron supplies for treating anemia, iron supplements for artificial meat, and use in biocatalysts to produce a wide range of compounds in the food, feed, pharmaceutical, chemical and cosmetic industries.

[0006] Isoprenoids and terpenoids are large families of natural compounds with many applications in the food, feed, pharmaceutical, flavor, fragrance, chemical and cosmetics industries.

[0007] Pyrroloquinoline quinone (PQQ), also called methoxatin, is a redox cofactor found in several enzymes. It has been shown to have potent antioxidant properties, as well as being a growth promoting agent, with applications as a food or pharmaceutical ingredient. Quinoproteins (e.g. methanol dehydrogenase, glucose dehydrogenase) can be also used in biosensing and bioconversion of useful compounds for medical applications as well as in bioremediation.

[0008] Additional dietary compounds that might advantageously be produced in a cell factory include the amino acids L-valine, L-leucine, L-isoleucine and L-glutamate. A biosynthetic route for their production, unlike chemical synthesis, ensures that the product is exclusively L-isomers. Since L-glutamate is the precursor of monosodium glutamate, this finds use as a food flavor. Biofuel production (such as butanol and isobutanol) may also be achieved using such a cell factory, since a biosynthetic route for production of such biofuels shares key catalytic steps in common with the branched-chain amino acids. Glutamate is a precursor of δ-aminolevulinic acid, which is the building block of pharmaceuticals, plastics and many different chemicals. δ-aminolevulinic acid is also the precursor of tetrapyrroles (porphyrins), which are compounds that can be produced in free- or protein-bound form with many applications in the medical, pharmaceutical, electronics and chemical industries.

[0009] Ammonium, obtained by means of biological Nitrogen Fixation (BNF) in a cell factory, would provide a source of natural fertilizers for plants, and replace current polluting nitrogen fertilizers used by agricultural industries. BNF also takes place in plants that form symbiotic associations with diazotrophs, where the efficiency of nitrogen deficiency determines the need for nitrogen fertilizers. Indigo is a blue dye in high demand in the global textile Industry whose industrial production currently relies on a chemical and polluting process.

[0010] The use of prokaryote-based cell factories is a potential route for the biosynthetic production of the above nutrient supplements. The advantages of recombinant E. coli as a cell factory for production of bio-products are widely recognized due to the fact that: (i) it has unparalleled fast growth kinetics; with a doubling time of about 20 minutes when cultivated in glucose-salts media and under optimal environmental conditions, (ii) it easily achieves a high cell density; where the theoretical density limit of an E. coli liquid culture is estimated to be about 200 g dry cell weight/L or roughly 1×10¹³ viable bacteria/mL. Additionally, there are many molecular tools and protocols at hand for genetic modification of E. coli; as well as being an organism that is amenable to the expression of heterologous proteins; both of which may be essential for obtaining high-level production of desired bio-products.

[0011] In general, there exists a need to identify the bottlenecks in those complex biosynthetic pathways that are dependent on Fe—S clusters and often required to facilitate the production of diverse compounds in prokaryote-based cell factories (e.g. E. coli), and to provide tailor-made cell factories that overcome the diversity of factors that may limit their use and productivity.

### SUMMARY OF THE INVENTION

[0012] According to a first embodiment the invention provides a genetically modified prokaryotic cell comprising:
[0013] a) a transgene or a genetically modified iscR gene encoding a mutant IscR polypeptide, and
[0014] b) transgenes or endogenous genes encoding at least one Fe—S cluster polypeptide, wherein the at least one FE—S cluster polypeptide is not any one of i. biotin synthase (EC: 2.8.1.6), ii. lipoic acid synthase (EC: 2.8.1.8), iii. HMP-P synthase (EC: 4.1.99.17), and vi. tyrosine lyase (EC: 4.1.99.19); and
   wherein the endogenous genes are operably linked to genetically modified regulatory sequences capable of enhancing expression of said endogenous genes, and wherein the mutant IscR polypeptide as compared to a corresponding non-mutant IscR polypeptide has an increased apoprotein:holoprotein ratio in the cell; and wherein the production of at least one compound resulting from the catalytic activity of the at least one Fe—S cluster polypeptide is enhanced when compared to a prokaryotic cell comprising the genetically unmodified iscR gene and the transgenes or the endogenous genes encoding at least one Fe—S polypeptide.

[0015] In a further embodiment, the amino acid sequence of said mutant IscR polypeptide comprises at least one amino acid modification and exits only as an apoprotein.

[0016] In a further embodiment, the genetically unmodified iscR gene is endogenous or heterologous to the cell.

[0017] In a further embodiment, the at least one Fe—S cluster polypeptide is heterologous or endogenous to the cell.

[0018] In a further embodiment, said at least one Fe—S cluster polypeptide is selected from the group consisting of: a HemN polypeptide having oxygen-independent coproporphyrinogen III oxidase synthase (EC: 1.3.98.3) activity; a HemZ polypeptide having oxygen-independent, coproporphyrinogen III oxidase synthase (EC: 1.3.98.3) activity; a P450 polypeptide having monooxygenase activity (EC: 1.14.14.1); a NadA polypeptide having quinolate synthase (EC: 2.5.1.72) activity; a CobG polypeptide having precorrin-3B synthase (EC: 1.3.98.3); an IlvD polypeptide having dihydroxy-acid dehydratase activity (EC: 4.2.1.9); an IspG polypeptide having 4-hydroxy-3-methylbut-2-en-1-yl diphosphate synthase (EC: 1.17.7.3); an IspH polypeptide having 4-hydroxy-3-methylbut-2-enyl diphosphate reductase activity (EC: 1.17.7.4); a large chain GltB polypeptide and a small chain GltD polypeptide having glutamate synthase [NADPH] activity (EC: 1.4.1.13); a PqqE polypeptide having PqqA peptide cyclase activity (EC: 1.21.98.4); a NifB polypeptide having nitrogenase FeMo cofactor biosynthesis activity; a NdoB and NdoC polypeptide having naphthalene 1,2-dioxygenase activity (EC: 1.14.12.12) together with a NdoA and NdoR polypeptide having ferredoxin-NAD(P)+ reductase activity (EC: 1.18.1.7); and a hydA polypeptide having hydrogenase activity (EC: 1.18.99.1)

[0019] In a further embodiment, the invention provides a cell culture, comprising the genetically modified prokaryotic cell, and a growth medium.

[0020] According to a second embodiment, the invention provides a method for producing a compound resulting from catalytic activity of said Fe—S cluster polypeptide, comprising the steps of:

[0021] introducing a genetically modified prokaryote of the invention, into a growth medium to produce a culture;

[0022] cultivating the culture; and

[0023] recovering said compound produced by said culture, and optionally purifying the recovered compound.

[0024] According to a third embodiment, the invention for a use of a genetically modified gene encoding a mutant iscR polypeptide to increase production of at least one compound resulting from the catalytic activity of at least one Fe—S cluster polypeptide in a genetically modified prokaryotic cell as compared to a prokaryotic cell comprising the genetically unmodified iscR gene, wherein said Fe—S cluster polypeptides not any one of biotin synthase (EC: 2.8.1.6), lipoic acid synthase (EC: 2.8.1.8), HMP-P synthase (EC: 4.1.99.17), and tyrosine lyase (EC: 4.1.99.19), wherein the mutant IscR polypeptide as compared to a non-mutant IsR polypeptide has an increased apoprotein:holoprotein ratio in the cell.

[0025] In a further aspect the invention provides a cell culture comprising the cell of the invention.

[0026] In a further aspect the invention provides a fermentation liquid comprising the cell culture of the invention, and its contents of a compound resulting from catalytic activity of the Fe—S cluster protein.

[0027] In a further aspect the invention provides a composition comprising the fermentation liquid of the invention and one or more agents, additives and/or excipients.

### BRIEF DESCRIPTION OF THE DRAWINGS

[0028] FIG. 1 Cartoon showing A) intermediates of the biotin pathway in bacteria and the respective enzymatic steps leading to synthesis of biotin. SAM: S-adenosyl-L-methionine, SAH: S-Adenosyl-L-homocysteine, CoA: coenzyme A, ACP: Acyl Carrier Protein, KAPA: 7-keto-8-aminopelargonic acid, AMTOD: S-adenosyl-2-oxo-4-thiomethylbutyrate, DAPA: 7,8-Diaminopelargonic Acid, DTB: desthiobiotin, 5′DOA: 5′-deoxyadenosine. B) isc-operon structure and role in Fe—S-cluster formation as well as the regulatory mechanism of IscR. The isc operon comprises an iscR gene encoding the IscR that regulates expression of the genes: iscS (cysteine desulfurase), iscU (scaffold), iscA (A-type protein), hscB (Dnaj-like co-chaperone), hscA (DnaK-like chaperone), and fdx (ferredoxin). IscR also regulates >40 genes including the genes hyaA, ydiU, erpA, and sufA.

[0029] FIG. 2 Graphical presentation of the cell density (measured at OD₆₀₀), measured over time, of a (E. coli BW25113) ΔbioB strain comprising an IPTG inducible bioB expression plasmid (right panel); and the reference (E. coli BW25113) strain comprising an IPTG inducible frameshifted bioB (premature stop codon) expression plasmid (left panel). OD₆₂₀ was measured using a plate reader and converted to OD₆₀₀, for 4 biological strain replicates grown in 200 μL mMOPS with 0.1 g/L DTB, 50 μg/mL kanamycin and either 0 (dots) 0.01 (triangles) or 0.1 (squares) mM IPTG. Respective exponential growth rate values are shown in the adjacent boxes.

[0030] FIG. 3 Graphical presentation of a scatter plot showing the final cell density (measured at OD₆₀₀) of cultures of E. coli BS1011 comprising plasmid pBS451 grown on 150 μL mMOPS medium with 40 μg/mL zeocin supplemented with zero or increasing concentrations of biotin, ranging up to 0.244 μg biotin/mL after incubation for 20 hours at 37° C. with 275 rpm shake (providing a bioassay calibration curve for quantifying biotin). The stippled vertical grey lines identify an optimal concentration range of between 0.04 to 0.24 μg biotin/L for the biotin bioassay.

[0031] FIG. 4 Bar diagram showing biotin production of 3 different iscR mutant strains expressing mutant IscR having amino acid mutations (BS1377, L15F), (BS1375, C92Y) and (BS1353, H107Y) and an E. coli BW25113 ΔbioB strain (BS1011, Ref) (see Table 1 for strains) in 4 biological replicates each comprising an IPTG-inducible bioB expression plasmid (pBS412). Strains were grown in 400 μL mMOPS with 0.1 g/L DTB and 50 μg/mL kanamycin for 24 hours at 37° C. with 275 rpm shake. Bars illustrate the mean biotin production value (height) and IPTG induction level (gray shade), black dots show biotin production from individual replicate cultures and the horizontal stippled line indicates the maximum biotin production from a reference wild type strain. Note that none of the strains produced detectable levels of biotin when cultured in the absence of IPTG.

[0032] FIG. 5 Graphical presentation of the cell density and biotin production of the iscR mutant strain expressing the mutant IscR (BS1353, H107Y), and an E. coli BW25113 ΔbioB strain (BS1011, Ref), wherein each stain comprises an IPTG-inducible bioB gene expression plasmid (pBS412). The data represents the average measured OD₆₀₀ of three biological replicates each of the iscR H107Y mutant strain (solid dark line) and the reference strain, E. coli BW25113 ΔbioB strain (stippled light grey) and biotin production by the respective iscR H107Y mutant strain (solid dark dots) and the reference strain, E. coli BW25113 ΔbioB strain (light gray dots) monitored over a period of 25 hours. The strains were grown in 50 mL mMOPS with 0.1 g/L DTB, 0.01 (A) or 0.5 mM IPTG (B) and 50 μg/mL kanamycin in a 250 mL baffled shake flask at 37° C. with 275 rpm shaking. Growth rates are shown in the black box.

[0033] FIG. 6 Cartoon showing the IscR coding sequence annotated to show the location of the nucleotide and amino acid sequence mutations in the iscR genes of the identified mutant strains.

[0034] FIG. 7 Cartoon showing the crystal structure (PDB entry 4HF1) of IscR dimer (grey) bound to hya DNA binding site (black) with L15F and H107Y iscR mutants indicated as sticks (WT amino acid in grey and mutant amino acid in black); and an expanded image highlighting the mutated residues.

[0035] FIG. 8 Bar diagram showing biotin production of an E. coli strain comprising an IPTG-inducible bioB expression plasmid and either a plasmid comprising an isc-operon (iscSUA-hscBA-fdx, corresponding to a native E. coli isc operon structure lacking iscR gene) or the E. coli suf-operon (sufABCDSE) operably linked to a strong ribosomal binding site (RBS) and a TS LacO repressed promoter from a medium copy number plasmid (p15A ori) or a control plasmid. The control plasmid comprised an IPTG-inducible gene encoding GFP instead of the suf- or isc-operon. Biological triplicates of each strain were cultured in mMOPS with 100 μg/mL ampicillin and 50 μg/mL spectinomycin under low (0.01 mM IPTG) and high (0.1 mM IPTG) induction and providing 0.1 g/L (DTB) as substrate. The strains were grown in deep well plates for 24 hours at 37° C. with 275 rpm, after which biotin production was evaluated using a growth-based bioassay. Bars illustrate the mean biotin production value (height) and IPTG induction level (gray shade), black dots show biotin production from individual replicates and the crosses show end-point (end) cell density of each strain, measured as OD₆₀₀. Note that none of the strains produced detectable levels of biotin when induced with 0.01 mM IPTG.

[0036] FIG. 9 Graphical presentation of the correlation between BioB protein expression levels and biotin production in 4 different samples performed in triplicate. The strains are BS1013 (E. coli BW25113, background strain) with pBS430 (bioB frameshift IPTG inducible plasmid), BS1011 (BS1013 with ΔbioB) with pBS412 (bioB IPTG inducible plasmid), BS1353 (BS1011 with iscR H107Y mutation) with pBS412. Strains were grown in mMOPS with 0.1 g/L DTB and IPTG as indicated in the graph.

[0037] FIG. 10 Bar diagram showing biotin de novo production of E. coli ΔbioB strains comprising an IPTG-inducible bioB expression plasmid and either of the following genomic variants of iscR: wild type (iscR WT), knock-out mutant encoding E22*glutamic acid mutated to a stop codon on position 22 (iscR KO), mutant (iscR C92Y) encoding a cysteine to tyrosine substitution at position 92. Bars illustrate the mean biotin production value (height) at given levels of IPTG induction (shade of gray), dots show biotin production from individual replicates. Biological triplicates of each strain were cultured in mMOPS with 100 μg/mL ampicillin under no (0 mM IPTG), low (0.01 mM IPTG) and high (0.1 mM IPTG) induction and providing 0.1 g/L DTB as substrate. Each strain was grown in a deep well plate for 24 hours at 37° C. with 275 rpm, after which biotin production was evaluated using a growth-based bioassay.

[0038] FIG. 11 Bar diagram showing biotin production by E. coli ΔbioABFCD iscR H107Y (encoding a histidine to tyrosine substitution at position 107) strains comprising IPTG-inducible BioB overexpression plasmid pBS679 alone (BS1937) or in addition pBS1112 (BS2185) with constitutive overexpression of FldA-Fpr or pBS1054 (BS2707) with constitutive overexpression of GFP. Each strain was cultured in mMOPS with 100 μg/ml ampicillin, 0.1 g/L desthiobiotin (DTB) as substrate and either 0, 0.01, 0.025, 0.05, 0.075 or 0.1 mM IPTG. The medium for BS2185 and BS2707 was identical except for the inclusion of 50 μg/mL kanamycin. The strains were grown in deep well plates for 24 hours at 37° C. with 275 rpm, after which biotin production was evaluated using a growth based bioassay. Bars illustrate biotin production value (height) by the respective strains: BS1937 (black bars); BS2185 (grey bars); and BS2707 (checkered grey bars).

[0039] FIG. 12 A Cartoon showing (upper part) the heme biosynthetic pathways in a prokaryote (e.g. Escherichia coli), catalyzed by ten enzymatic steps. The key enzymes in the pathway include Glutamate-tRNA ligase (GltX); Glutamyl-tRNA reductase (HemA); Glutamate-1-semialdehyde 2,1-aminomutase (HemL); Delta-aminolevulinic acid dehydratase (HemB); Porphobilinogen deaminase (HemC); Uroporphyrinogen III methyltransferase (HemD); Uroporphyrinogen decarboxylase (HemE). The synthesis of Protoporphyrinogen IX from Coproporphyrin II is catalyzed by either HemN or HemF. HemN is an [4Fe-4S] cluster-dependent enzyme which uses two molecules of S-adenosyl-methionine (SAM) as cofactors, releasing 5′-deoxyadenosine (5′-DOA) and methionine per turnover. HemF is an oxygen-dependent coproporphyrinogen III oxidase synthase (EC: 1.3.3.3), which consumes two molecules of the co-factor S-adenosyl-methionine (SAM). Protoporphyrinogen IX is further catalyzed into Protoporphyrin IX and finally heme is formed via menaquinone (HemG) and ferrochelatase (HemH). Abbreviations: L-glutamate 1-semialdehyde (GSA); δ-aminolevulinic acid (ALA); hydroxymethylbilane (HMB); Uroporphyrinogen III (Urogen III); Copropophyrin III (Copro III); Protoporphyrinogen IX (Protogen IX); Protoporphyrin IX (Proto IX); Adenosyl Tri Phosphate (ATP); Nictotinamide Adenine Dinucleotide (NADH). (Lower part) shows the isc-operon structure and role in Fe—S-cluster formation as well as the regulatory mechanism of IscR (see FIG. 1B).

[0040] FIG. 12B Cartoon showing a model reaction for enhanced production of hemoproteins. The model reaction is illustrated by the enzymes P450-BM3 (Fe—S cluster—independent), and P450-CAM ([2Fe-2S] cluster dependent) using indole as substrate, which is oxidased to indoxyl, and where the end product indigo is detected.

[0041] FIG. 12C shows the HemF and HemB production potential at different IPTG induction levels in E. coli comprising IscR mutant H107Y compared to E. coli not comprising the IscR mutant.

[0042] FIG. 12D shows the HemN and HemB production potential at different IPTG induction levels in E. coli comprising IscR mutant H107Y compared to E. coli not comprising the IscR mutant.

[0043] FIG. 12E shows the HemZ and HemB production potential at different IPTG induction levels in E. coli comprising IscR mutant H107Y compared to E. coli not comprising the IscR mutant.

[0044] FIG. 13 Cartoon showing (upper part) Vitamin B3 complex (NR, NAM and NA) biosynthetic pathway in a prokaryotes. The intermediate Quinolate is made by the condensation and cyclisation of 2-iminosuccinate by the [4Fe-4S] cluster enzyme NadA, requiring dihydroxy acetone phosphate (DHAP) as a co-factor. Nicotinic acid mononucleotide (NaMN) synthesis from quinolate is catalyzed by NadC and Nicotinic acid adenine dinucleotide (NaAD) formation from NaMN is catalyzed by NadD. Nicotinamide adenine dinulceotide (NAD+) formation is catalysed by NadE, via ATP-dependent amidation of NaAD. NudC and aphA subsequently convert NAD+ to nicotinamide mononucleotide (NMN) and Nicotinamide riboside (NR), respectively. NadE* is a NadE homologoue which prefers NaMN as a substrate and can convert NaMN to NMN directly. Nicotinamide (NAM) is produced by phosphatase activity of the NMN nucleosidase. NAM is converted to nicotinic acid by pncA. ATP=Adenosyl tri-phosphate; AMP=Adenosyl mono-phosphate; PP=Diphosphate; PRPP=5-phospho-alpha-D-ribose-1-diphosphate. (Lower part) shows the isc-operon structure and role in Fe—S-cluster formation as well as the regulatory mechanism of IscR (see FIG. 1B).

[0045] FIG. 14A Diagrams showing the OD₆₂₀ₙₘ of cultures over time, as a measure of cell growth, for E. coli strains expressing IscR WT protein (BS2629/BS2379) and IscR mutant protein (BS2630/BS2382) and comprising either a control empty plasmid (left panels) or a plasmid encoding E. coli NadA (right panels) without induction (top panels) or with IPTG induction (bottom panels). The strains with empty plasmid (BS2629/BS2630) and plasmid encoding E. coli nadA (BS2379/BS2382) were induced with 1 and 0.064 mM IPTG, respectively (bottom left and right). The error bars denote the standard deviation of four biological replicates.

[0046] FIG. 14B shows the relative production of quinolateat different IPTG induction levels in E. coli comprising IscR mutant H107N compared to E. coli not comprising the IscR mutant.

[0047] FIG. 15 Cartoon showing the aerobic cobalamin biosynthetic pathway in a prokaryote (e.g. Pseudomonas denitrificans). The synthesis of Precorrin-3-B from Precorrin-3-A is catalyzed by the [4Fe-4S] cluster enzyme CobG. The isc-operon structure and its role in supplying Fe—S-clusters to the CobG enzyme is shown. Cobalt in imported in the cell factory by using the cobal transporter made of the proteins CbiNQOM. SAM=S-Adenosyl Methionine; SAH=S-Adenosyl-Homocysteine; ATP=Adenosyl Tri Phosphate; ADP=Adenosyl Bi Phosphate; HBA=Hydrogenobyrinic Acid; HBAD=Hydrogenobyrinic Acid a,c diamide; RAYP=(R)-1-amino-2-propanol 0-2-phosphate; DMB=5,6-dimethylbenzimidazole; NDR=β-nicotinate D-ribonucleotide; R5P=α-ribazole 5′-phosphate; Nt=Nicotinate; GTP=Guanosyl Tri Phosphate; GMP=Guanosyl Mono Phosphate. At the left side, the isc-operon is shown and the role in Fe—S-cluster formation as well as the regulatory mechanism of IscR (see FIG. 1B).

[0048] FIG. 16A Cartoon showing the common pantothenate and branched amino acid biosynthetic pathways. A) is the L-leucine, L-valine and pantothenate biosynthetic pathway; which share a common precursor, 3-methyl-2-oxobutanoate, whose synthesis from 2,3-dihydroxy-3-methylbutanoate is catalyzed by IlvD. (B) is the L-isoleucine biosynthetic pathway, where IlvD also catalyzes the synthesis of 3-methyl-2-oxopentanoate from 2,3-dihydroxy-3-methylpentanoate. NADPH=Nicotinamide adenine dinucleotide phosphate. The isc-operon structure and its role in supplying Fe—S-clusters to the IlvD enzyme is shown.

[0049] FIG. 16B Cartoon showing the common pathways from L-threonine to L-isoleusine in prokaryotes FIG. 17 Diagrams showing the OD₆₂₀ₙₘ of cultures over time, as a measure of cell growth, for E. coli strains expressing IscR WT protein (BS2629/BS2378) and IscR mutant protein (BS2630/BS2381) and comprising either a control empty plasmid (left panels) or a plasmid encoding E. coli ilvD (right panels) without induction (top panels) or with IPTG induction (bottom panels). The strains with empty plasmid (BS2629/BS2630) and plasmid encoding E. coli ilvD (BS2379/BS2381) were induced with 1 and 0.028 mM IPTG, respectively (bottom left and right). The error bars denote the standard deviation of four biological replicates.

[0050] FIG. 18 Cartoon showing the Methyl Erythritol Pathway (MEP) isoprenoid pathway in a prokaryote (e.g. Escherichia coli). The isc-operon structure and its role in supplying Fe—S-clusters to the IspG and IspH enzymes is shown. ADP=adenosinediphosphate; ATP=adenosine triphosphate; CMP=cytidine monophosphate; CTP=cytidine triphosphate; DHAP=dihydroxyacetone phosphate; DMAPP=dimethylallyl diphosphate; DXP=1-deoxyxylulose 5-phosphate; HMBPP=1-hydroxy-2-methyl-2-(E)-butenyl 4-diphosphate; IPP=isopentenyl diphosphate; MEcPP=2-C-methyl-D-erythritol-2,4 cyclodiphosphate; MEP=2-C-methyl-D-erythritol-4-phosphate; NAD+=nicotinamide adenine dinucleotide (oxidized); NADH=nicotinamide adenine dinucleotide (reduced); NADP+=nicotinamide adenine dinucleotide phosphate (oxidized); NADPH=nicotinamide adenine dinucleotide phosphate (reduced); PP=pyrophosphate.

[0051] FIG. 19 Cartoon showing the glutamic acid and δ-aminolevulinic acid biosynthesis pathway in E. coli from alpha-ketoglutarate, a product of the TCA cycle. The [4Fe-4S] cluster enzyme GltDB, is a complex of two subunits GltB and GltD and catalyses the formation of two L-glutamate molecules from one alpha-ketoglutarate and one L-glutamine molecule. L-glutamate can thereafter be converted to ALA catalyzed by the proteins GltX, HemA and HemL, and then for heme biosynthesis. The isc-operon structure and its role in supplying Fe—S-clusters to the GltBD enzyme is shown. TCA=Tricarboxylic acid; ALA=δ-aminolevulinic acid; NADPH=Nicotinamide adenine dinucleotide phosphate.

[0052] FIG. 20 Cartoon showing the proposed PQQ biosynthetic pathway. The synthesis starts from the short peptide PqqA and its cyclisation by the radical-SAM [4Fe-4S] enzyme PqqE that collaborates with the protein PqqD. The peptide is further cleaved by the enzyme PqqF. After further catalytic steps, of one carried by a yet unknown enzyme, PQQ is finally synthesised and transferred to the bacterial membrane by the enzyme PqqB. CL-PqqA=Cross-linked PqqQ peptide; AACHP=2-amino-4-[5-(2-amino-2-carboxylatoethyl)-2-hydroxyphenyl]pentanedioate; ACTD=6-(2-amino-2-carboxylatoethyl)-1,2,3,4-tetrahydroquinoline-2,4-dicarboxylate; ACDHD=6-(2-amino-2-carboxyethyl)-7,8-dioxo-1,2,3,4,7,8-hexahydroquinoline 2,4-dicarboxylate; PQQ=pyrroloquinoline quinone; IM-PQQ=Inter-membrane pyrroloquinoline quinone; SAM=S-adenosyl-methionine; 5′DA=5′Deoxyadenosine; Pep-Nter=cleaved N-ter part of CL-PqqA; Pep-Cter=cleaved C-ter part of CL-PqqA.

[0053] FIG. 21 A) Cartoon showing a biosynthetic pathway for nitrogenase M-cluster and P-cluster assembly, comprising a [Fe8-S9-C] cluster bound to a homocitrate (HC) by a molybdenum atom (Mo). NifB catalyses the incorporation of [Fe8-S9-C] carbon by an S-adenosyl-methionine (SAM) radical mechanism dependent on its own [4Fe-4S] cluster. (B) Cartoon showing the nitrogenase complex. 5′-dAH=5′-deoxy-adenosine homocysteine. HC=Homocysteine. (B) Cartoon showing the nitrogenase complex. 5′-dAH=5′-deoxy-adenosine homocysteine.

[0054] FIG. 22 Diagrams showing the OD₆₂₀ₙₘ of cultures over time, as a measure of cell growth, for E. coli strains expressing IscR WT protein (BS2629/BS2470) and IscR mutant protein (BS2630/BS2472) and comprising either a control empty plasmid (left panels) or a plasmid encoding E. coli ilvD (right panels) without induction (top panels) or with IPTG induction (bottom panels). The strains with empty plasmid (BS2629/BS2630) and plasmid encoding E. coli ilvD (BS2470/BS2472) were induced with 1.0 mM IPTG, respectively (bottom left and right). The error bars denote the standard deviation of four biological replicates.

[0055] FIG. 23 Cartoon showing de novo and tryptophan-dependent biosynthetic pathways for production of indigo in E. coli. Both pathways depend on the conversion of indole to indoxyl catalyzed by a monoxygenase such as the Rieske oxygenase complex (e.g. NodBCRA from Pseudomonas putida), requiring an [2Fe-2S] cluster. The tryptophan-dependent pathway is mediated by the enzyme TnaA converting this precursor into indole. ATH=Anthranilate; N5PA=N-(5-phosphoribosyl)-anthranilate; 1O1D=1-(o-carboxyphenylamino)-1′-deoxyribulose 5′-phosphate; 1C3P=(1S,2R)-1-C-(indol-3-yl)glycerol 3-phosphate; indole-2,3D=cis-indole-2,3-dihydrodiol.

### DEFINITIONS

[0056] Amino acid sequence identity: The term “sequence identity” as used herein, indicates a quantitative measure of the degree of homology between two amino acid sequences of substantially equal length. The two sequences to be compared must be aligned to give a best possible fit, by means of the insertion of gaps or alternatively, truncation at the ends of the protein sequences. The sequence identity can be calculated as ((Nref−Ndif)100)/(Nref), wherein Ndif is the total number of non-identical residues in the two sequences when aligned and wherein Nref is the number of residues in one of the sequences. Sequence identity calculations are preferably automated using the BLAST program e.g. the BLASTP program (Pearson W. R and D. J. Lipman (1988)) (www.ncbi.nlm.nih.gov/cgi-bin/BLAST). Multiple sequence alignment is performed with the sequence alignment method ClustalW with default parameters as described by Thompson J., et al 1994, available at http://www2.ebi.ac.uk/clustalw/.

[0057] Preferably, the numbers of substitutions, insertions, additions or deletions of one or more amino acid residues in the polypeptide as compared to its comparator polypeptide is limited, i.e. no more than 1, 2, 3, 4, 5, 6, 7, 8, 9, or 10 substitutions, no more than 1, 2, 3, 4, 5, 6, 7, 8, 9, or 10 insertions, no more than 1, 2, 3, 4, 5, 6, 7, 8, 9, or 10 additions, and no more than 1, 2, 3, 4, 5, 6, 7, 8, 9, or 10 deletions. Preferably the substitutions are conservative amino acid substitutions: limited to exchanges within members of group 1: Glycine (G), Alanine (A), Valine (V), Leucine (L), Isoleucine (I); group 2: Serine (S), Cysteine (C), Selenocysteine (U), Threonine (T), Methionine (M); group 3: proline (P); group 4: Phenylalanine (F), Tyrosine (Y), Tryptophan (W); Group 5: Aspartate (D), Glutamate (E), Asparagine (N), Glutamine (Q) and Group 6: Arginine (R), histidine (H) and lysine (K).

[0058] Endogenous gene: is a gene in a prokaryotic cell genome that is homologous in origin to a host prokaryotic cell (i.e. a native gene of the host prokaryotic cell). The endogenous gene may be genetically modified using tools known in the art whereby the genetically modified endogenous gene encodes a mutant polypeptide whose amino acid sequence differs at one or more position from the polypeptide encoded by the parent endogenous gene from which it was derived.

[0059] Genome: is the genetic material present in a prokaryotic cell; said genome comprising all of the information needed to build and maintain that cell or organism; and includes the genetic material in both chromosome(s) and any episomal genetic element(s) (including plasmid(s)) present within the cell or organism.

[0060] Genetically modified regulatory sequence: is a regulatory sequence that is operably linked to a gene comprising a protein coding or non-coding sequence; wherein said regulatory sequence is capable of enhancing transcription of said operably linked gene as compared to the native regulatory sequence of said gene; wherein said regulatory sequence is selected from 1) a promoter region sequence and any enhancer element sequence therein; and 2) is-regulatory elements (for example ribosomal binding site) that provide binding sites of transcription factors that are capable of enhancing transcription of said gene.

[0061] GFP: Green Fluorescent Protein.

[0062] gi number: (genInfo identifier) is a unique integer which identifies a particular sequence, independent of the database source, which is assigned by NCBI to all sequences processed into Entrez, including nucleotide sequences from DDBJ/EMBL/GenBank, protein sequences from SWISS-PROT, PIR and many others.

[0063] Heterologous gene: encodes a polypeptide derived from an organism that is different from the organism into which the heterologous gene is expressed.

[0064] Isc pathway: iron sulfur cluster pathway; encoded by the isc operon including the iscR gene.

[0065] Multiskan: filter-based microplate photometer; for measuring absorbance from 96 or 384-well plate formats in the wavelength range of 340 to 850 nm, including 600-620 nm. Plates are incubated in the photometer at the selected temperature, of up to 50° C. The photometer is supplied by Thermo Scientific.

[0066] Native gene: endogenous coding or non-coding gene in a bacterial cell genome, homologous to host bacterium.

[0067] Non-native promoter: in the context of a genetically modified prokaryotic cell of the present invention, is a promoter that is operably-linked to a gene or transgene in said cell, where said promoter would not be found operably-linked to said gene or transgene in a prokaryotic cell found in nature.

[0068] OD: Optical Density

[0069] Promoter activity: is the measured strength in arbitory units i.e. measured relative activity of a promoter to drive expression of a reporter gene encoding Fluorescent Protein in E. coli, as described by Mutalik et al. 2013. A promoter that is capable of enhancing expression of an operably linked endogenous gene as compared to the native regulatory sequence of said gene is defined herein as a promoter having a measured strength of 370 AU, which is the coincidentally the value for promoter apFAB306.

[0070] Transgene: is an exogenous gene that has been introduced into the genome of a prokaryotic cell by means of genetic engineering. In the context of the present invention, said exogenous gene may have a nucleotide sequence identical to a native or non-native gene of said prokaryotic cell and may encode a protein that is native or non-native to said prokaryotic cell; wherein said genome includes both chromosomal and episomal genetic elements.

[0071] Upregulated endogenous gene: is an endogenous gene operably linked to a genetically modified regulatory sequence capable of enhancing expression of said endogenous gene as compared to the native regulatory sequence of said gene.

### DETAILED DESCRIPTION OF THE INVENTION

[0072] A common feature of many biological compounds when produced by fermentation in prokaryotes is that their biosynthesis employs a step catalyzed by, or dependent on, the activity of one or more iron-sulfur (Fe—S) cluster protein. Optimal product titers by microbial fermentation however are hampered by the fact that overexpression of such pathways leads to growth inhibition. For example, to produce biotin the overexpression of the biotin operon, or even a mutant biotin operon insusceptible to feedback regulation by the BirA repressor, led to a strong inhibition of growth (Ifuku, O. et al., 1995). In the absence of any evidence-based explanation for the observed growth inhibition; alternative approaches were needed to identify the cellular factors that may account for the toxicity of elevated synthesis of Fe—S cluster proteins.

[0073] The solution to this problem, provided by the present invention, is shown to be equally applicable for enhancing the synthesis of any Fe—S cluster protein in a prokaryotic cell factory (for example E. coli). The approach pursued to solve this problem was to generate libraries of E. coli cells having evolved genomic diversity due to the accumulation of background mutations generated by imperfect error-correcting polymerases. Cells of such libraries were transformed with a plasmid comprising an IPTG-inducible bioB gene expression cassette, encoding a polypeptide of the Fe—S cluster protein, biotin synthase. Candidate mutants were those cells in a library that were capable of growth in the presence of IPTG at a concentration sufficient to induce BioB expression toxicity in the parent E. coli strain from which the mutant cells were derived.

[0074] The genetic basis for the growth of the selected BioB-expressing mutant strains was established by whole genome sequencing. Surprisingly three of the strains were found to have mutations in the native Iron Sulfur Cluster Regulator gene (iscR); which encodes a pleiotropic transcription factor (IscR) [SEQ ID No.: 2]. Fe—S clusters are co-factors of many proteins and essential enzymes, endowing them with diverse biochemical abilities that are not solely required for the synthesis of S-containing compounds, but also as regulatory proteins in the form of sensors for redox- or iron-related stress conditions, as well as for mediating electron transfer, radical or non-redox reactions, and sulfur donation.

[0075] IscR exists in two states, either as an Fe—S cluster holo-protein, or as the apo-protein without the Fe—S cluster. Assembly of the Fe—S cluster of IscR is catalyzed by the Isc pathway encoded by the isc operon. The isc operon encodes firstly the regulator (IscR), followed by a cysteine desulfurase (IscS), a scaffold (IscU), an A-type protein (IscA), a DnaJ-like co-chaperone (HscB), a DnaK-like chaperone (HscA) and a ferredoxin (Fdx). In addition to being essential for the assembly of the IscR holoenzyme, the Isc pathway is the primary pathway for Fe—S cluster biogenesis in E. coli(FIG. 16).

[0076] The ratio between the two forms of IscR is determined by the cellular level of [2Fe-2S] clusters, which in turn is influenced by several factors including iron- and oxygen levels (Py, B. & Barras, 2010). Under iron-rich conditions, IscR exists mainly as the holoenzyme, which then acts as a transcriptional repressor of the isc operon. However, under iron-low conditions (low level of [2Fe-2S] clusters), IscR returns to its apo-protein state, allowing transcription of the isc operon. In its apo-protein state, IscR serves as an activator of the sufABCDSE operon, which catalyzes Fe—S cluster biogenesis under oxidative stress.

[0077] In addition to regulating expression of the two Fe—S-cluster assembly systems in E. coli, IscR regulates >40 genes involved in diverse mechanisms of action such as improved assembly of Fe—S clusters (e.g., suf operon), oxidative stress mechanisms (e.g. sodA), specific and global regulators (e.g. yqjl and soxS), amino acid biosynthesis (e.g argE) and a range of genes with unknown functions. The role of IscR is further complicated by the fact that the IscR regulatory landscape changes between aerobic and anaerobic conditions (Giel et al., 2006).

[0078] In view of the homeostatic role of IscR and its role in global gene regulation; the consequences of any modification of its regulatory properties are unpredictable and probably profound for cellular metabolism. Furthermore, cellular conditions where Fe—S cluster biogenesis is increased, due to elevated expression of both the sulfur formation (suf) and isc pathways creates the risk that the accumulated Fe—S clusters generate peroxide radicals by Fenton reactions.

[0079] In this light, it was highly unexpected that IscR should be found so important for the activity and toxicity of a cellular Fe—S cluster protein, such as BioB, as demonstrated by the three isolated individual mutants. Furthermore, the impact of the mutant IscR protein on end-product (e.g. biotin) biosynthesis was unexpected, since over-expression of the isc operon or suf operons giving an increased capacity to synthesize and assemble Fe—S clusters was not found to enhance biotin production in cells over-expressing bioB (see example 1, FIG. 8). Furthermore, removal of cellular iscR regulation by knock-out of the iscR gene also failed to enhance biotin production in the cell (see example 1, FIG. 10).

[0080] The three different mutations in the IscR protein that eliminated the toxicity of BioB expression in the mutant cells, were single amino acid substitutions of the amino acids L15 [SEQ ID No.: 16], C92 [SEQ ID No.: 18] and H107 [SEQ ID No.: 20] (FIG. 4). Two of the three mutations correspond precisely to those residues in IscR, each of which is known to be essential for the formation of the IscR holo-protein. IscR, as seen in E. coli, has an unusual Fe—S cluster ligation mechanism, whereby the residues essential for Fe—S cluster ligation are C92, C98, and C104, as well as H107. This atypical ligation may confer a lower stability of the holoenzyme state of IscR relative to other Fe—S proteins that in turn accounts for the switch to the apo-protein state during low Fe—S conditions (Fleischhacker et al., 2012).

[0081] While not wishing to be bound by theory, this suggests that homeostatic control of Fe—S cluster biogenesis and global gene regulation required for cell growth are uniquely preserved in cells expressing a mutant iscR gene of the invention, while facilitating the assembly of Fe—S cluster containing enzymes, even during their over-expression.

[0082] In summary, the inventors have identified a mutant iscR gene encoding a mutant IscR polypeptide, characterized by the lack of one or more of amino acid residues required for ligation of Fe—S clusters, such that the expressed mutant IscR protein exists solely in the apo-protein form. Synthesis of iron-sulfur cluster containing polypeptides is shown to constitute a significant bottleneck in efforts to enhance production of the biochemical products of pathways requiring such Fe—S proteins in prokaryotes. The solution to this problem, as provided by the present invention, is facilitated by over-expression of these Fe—S polypeptides in a cell factory comprising a gene encoding a mutant IscR polypeptide that exists only in the apo-protein state.

[0083] The various embodiments of the invention are described in more detail below.

### I A Genetically Modified Prokaryotic Cell for Over-Expression of Fe—S Polypeptide(s)

[0084] According to a first embodiment, the invention provides a genetically modified prokaryotic cell comprises a genetically modified iscR gene encoding a mutant IscR, as well as either at least one transgene, or at least one endogenous gene operably linked to a genetically modified regulatory sequence capable of enhancing expression of said endogenous gene (herein called an upregulated endogenous gene); wherein the transgene or endogenous gene encodes any Fe—S cluster polypeptide excluding biotin synthase (EC: 2.8.1.6), lipoic acid synthase (EC: 2.8.1.8), HMP-P synthase (EC: 4.1.99.17), and tyrosine lyase (EC: 4.1.99.19).

[0085] The mutant IscR polypeptide is derived from a wild-type member of a family of IscR polypeptides, whereby the mutant IscR is characterized by an amino acid sequence comprising at least one amino acid substitution when compared to its wild-type parent IscR polypeptide; and as a consequence of said at least one substitution the mutants IscR polypeptide, when expressed in a genetically modified prokaryotic cell of the invention, exits only as an apoprotein (i.e. it is unable to exist in a Fe—S cluster holoprotein state). The prokaryotic cell may comprise a genetically modified endogenous iscR gene; or alternatively a transgene encoding a mutant IscR polypeptide but where the native IscR gene is inactive. When a Fe—S cluster polypeptide is over-expressed in a genetically modified prokaryotic cell of the invention, the cells exhibit enhanced growth, and the activity of the respective Fe—S cluster polypeptide is enhanced, as compared to over-expression in a prokaryotic cell having gene encoding a wild-type IscR polypeptide.

[0086] The Fe—S cluster polypeptide, encoded by a gene expressed in a prokaryotic cell of the invention, has one of a wide diversity of biochemical abilities, and may be one selected from the group set out in Table A:

TABLE A

| Uniprot | | EC | | Cross-reference |
|---|---|---|---|---|
| Entry | Protein names | number | Molecule class | (RefSeq) |
| P32131 | Oxygen-independent | 1.3.98.3 | Porphyrins and derivatives | WP_000116090.1 |
| | coproporphyrinogen | | | |
| | III oxidase | | | |
| P11458 | Quinolate synthase | 2.5.1.72 | Quinolate and derivatives | WP_000115290.1 |
| M4XAX7 | Precorrin-3B synthase | 1.14.13.83 | Porphyrins and derivatives | WP_015475360.1 |
| P05791 | Dihydroxy-acid | 4.2.1.9 | 2-keto-isovalerate and derivatives | WP_001127399.1 |
| | dehydratase | | and 2-keto-3-methyl-valerate and | |
| | | | derivatives | |
| O67496 | 4-hydroxy-3-methylbut-2- | 1.17.7.3 | Isoprenoids and derivatives | WP_000551807.1 |
| | en-1-yl diphosphate | | | |
| | synthase | | | |
| P62623 | 4-hydroxy-3-methylbut-2- | 1.17.7.4 | Isoprenoids and derivatives | WP_001166395.1 |
| | enyl diphosphate reductase | | | |
| P09831 | glutamate synthase | 1.4.1.13 | Glutamate and derivatives | WP_001300352.1 |
| | [NADPH] large chain | | | |
| P09832 | Glutamate synthase | 1.4.1.13 | Glutamate and derivatives | WP_000081674.1 |
| | [NADPH] small chain | | | |
| P27507 | PqqA peptide cyclase | 1.21.98.4 | Pyrroloquinoline quinone and | WP_004184158.1 |
| | | | derivatives | |
| C1DMB1 | Nitrogenase FeMo cof | — | Nitrogen and derivatives | WP_012703541 |
| | actor biosynthesis | | | |
| | protein | | | |
| P0A110 | Naphthalene 1,2- | 1.14.12.12 | Indigo and derivatives | WP_011117400.1 |
| | dioxygenase system, | | | |
| | large oxygenase | | | |
| | component | | | |
| P0A112 | Naphthalene 1,2- | 1.14.12.12 | Indigo and derivatives | WP_011117401.1 |
| | dioxygenase system, | | | |
| | small oxygenase | | | |
| | component | | | |
| P0A185 | Naphthalene 1,2- | 1.18.1.7 | Indigo and derivatives | WP_011117470.1 |
| | dioxygenase system, | | | |
| | ferredoxin component | | | |
| Q52126 | Naphthalene 1,2- | 1.18.1.7 | Indigo and derivatives | WP_011117469.1 |
| | dioxygenase system | | | |
| | reductase component | | | |
| A0A1B7 | NADH-ubiquinone | 1.6.5.3 | Xanthine and derivatives | WP_064543883.1 |
| K3G1 | oxidoreductase subunit E | | | |
| A0A085 | NADH-ubiquinone | 1.6.5.3; | Xanthine and derivatives | WP_038156621.1 |
| A9T8 | oxidoreductase chain E | 1.6.99.5 | | |
| A0A1J5 | Limonene hydroxylase | 1.1.1.144; | Limonene and derivatives | WP_011393389.1 |
| NEE5 | | 1.1.1.243; | | |
| | | 1.14.13.49 | | |
| Q47914 | Tetrachlorobenzoquin | 1.1.1.404 | Benzoquinone and derivatives | WP_013849281.1 |
| | one | | | |
| Q8E8Z1 | Formate dehydrogenase | 1.1.5.6 | Hydrogenase, hydrogen or derivatives | WP_011074128.1 |
| | molybdopterin- | | | |
| | binding subunit FdhA | | | |
| A0A0K0 | Formate dehydrogenase | 1.2.1.2 | Hydrogenase, hydrogen or derivatives | WP_025799130.1 |
| HQP3 | major subunit | | | |
| A0A0P1 | Formate | 1.1.99.33 | Hydrogenase, hydrogen or derivatives | WP_058289S83.1 |
| G7P8 | dehydrogenase H | | | |
| I9ZCE7 | Quinone-reactive | 1.12.1.2 | Hydrogenase, hydrogen or derivatives | WP_000499095.1 |
| | Ni/Fe hydrogenase | | | |
| | small subunit (HydA) | | | |
| Q8U2E5 | Sulfur reductase | 1.12.98.4 | Hydrogenase, hydrogen or derivatives | WP_011012026.1 |
| | subunit (HydB) | | | |
| D5E3H2 | Mevastatin | 1.14.—.— | Mevastatin and derivatives | WP_013060111.1 |
| | hydroxylase | | | |
| O85673 | Anthranilate 1,2- | 1.14.12.1 | Anthranilate and derivatives | WP_004928945.1 |
| | dioxygenase large | | | |
| | subunit | | | |
| P07769 | Benzoate 1,2- | 1.14.12.10 | Benzoates or derivatives | WP_004925496.1 |
| | dioxygenase subunit | | | |
| | alpha | | | |
| P37333 | Biphenyl dioxygenase | 1.14.12.18 | Biphenyls and derivatives | WP_011494299.1 |
| | subunit alpha | | | |
| P0ABR6 | 3-phenylpropionate/ | 1.14.12.19 | Cinnamic acid and derivatives | WP_000211172.1 |
| | cinnamic acid | | | |
| | dioxygenase | | | |
| Q8G8B6 | Carbazole 1,9- | 1.14.12.22 | Carbazole and derivatives | WP_011077878.1 |
| | dioxygenase | | | |
| Q51974 | p-cumate 2,3- | 1.14.12.25 | p-cumeate and derivatives | WP_012052617.1 |
| | dioxygenase system | | | |
| A5W4F2 | Benzene and toluene | 1.14.12.3; | Benzene and derivatives | WP_012052601.1 |
| | dioxygenase | 1.14.12.11 | Toluene and derivatives | |
| H9N290 | Methylxanthine N3- | 1.14.13.179 | Methylxanthine and derivatives | WP_046819639.1 |
| | demethylase | | | |
| F0KFI5 | Carnitine monooxygenase | 1.14.13.239 | Carnitine and derivatives | WP_002120432.1 |
| | oxygenase subunit | | | |
| P22868 | Methane monooxygenase | 1.14.13.25 | Methanol and derivatives | WP_010960487.1 |
| | component C | | | |
| A0A162 | Limonene hydroxylase | 1.14.13.48 | Limonene and derivatives | WP_068747318.1 |
| MZU2 | | | | |
| Q7WTJ2 | Phenol hydroxylase | 1.14.13.7 | Catechol and derivatives | WP_014206216.1 |
| P9WPP2 | Methyl-branched lipid | 1.14.15.14 | Methyl-branched lipids and | WP_003917608.1 |
| | omega-hydroxylase | | derivatives | |
| A0A059 | Chloroacetanilide N- | 1.14.15.23 | Chloroacetanilide and derivatives | WP_051743970.1 |
| WLZ7 | alkylformylase | | | |
| P9WPL5 | Steroid monooxygenase | 1.14.15.28 | Steroids and derivatives | WP_003900082.1 |
| P63710 | Steroid monooxygenase | 1.14.15.29 | Steroids and derivatives | WP_003419304.1 |
| P71875 | 3-ketosteroid-9- | 1.14.15.30 | Steroids and derivatives | WP_003419211.1 |
| | alpha-monooxygenase | | | |
| Q82IY3 | Pentalenene oxygenase | 1.14.15.32 | pentalenene and derivatives | WP_010984430.1 |
| Q00441 | 6-deoxyerythronolide | 1.14.15.35 | Erythromycin and derivatives | WP_009950397.1 |
| | B hydroxylase | | | |
| P17055 | Spheroidene | 1.14.15.9 | Spheroidene and derivatives | WP_013066422.1 |
| | monooxygenase | | | |
| Q9FCA6 | Biflaviolin synthase | 1.14.19.69 | Bioflaviolin and derivatives | WP_003977624.1 |
| | CYP158A2 | | | |
| P9WPP7 | Mycocyclosin synthase | 1.14.19.70 | Mycolysin and derivatives | WP_003411685.1 |
| B1WQF1 | 4-hydroxy-3-methylbut-2- | 1.17.7.1 | Isoprenoids and derivatives | WP_009544989.1 |
| | en-1-yl diphosphate | | | |
| | synthase | | | |
| Q8GI14 | Carbazole 1,9a- | 1.18.1.3 | Carbazole and derivatives | WP_011077884.1 |
| | dioxygenase | | | |
| G9F1Y9 | Cinnamate reductase | 1.3.1.— | Cinnamic acid and derivatives | WP_003493847.1 |
| Q7M826 | 8- | 1.3.5.— | Menaquinol and derivatives | WP_011139713.1 |
| | methylmenaquinol:fumarate | | | |
| | reductase iron-sulfur | | | |
| | subunit | | | |
| P45866 | Probable iron-sulfur- | 1.3.8.7 | Long-chain (2E)-enoyl-CoA | WP_003244084.1 |
| | binding oxidoreductase | | | |
| | FadF | | | |
| Q8F1F5 | CRISPR-associated | 3.1.12.1 | CRISPR enzymes and derivatives | WP_002068643.1 |
| | exonuclease Cas4/ | | | |
| | endonuclease Cas1 | | | |
| | fusion | | | |
| Q18CP4 | 4-hydroxyphenylacetate | 4.1.1.83 | Methylphenol and derivatives | WP_003425410.1 |
| | decarboxylase small | | | |
| | subunit | | | |
| A0A0U5 | Cyclic pyranopterin | 4.1.99.18 | Pyranopterin and derivatives | WP_057572494.1 |
| K4Y8 | monophosphate synthase | | | |
| Q2RHR5 | 5- | 4.1.99.23 | Hydroxybenzoimidazole and | WP_011393224.1 |
| | hydroxybenzimidazole | | derivatives | |
| | synthase | | | |
| Q8EJW3 | 2-methylcitrate | 4.2.1.117 | Isocitrate and derivatives | WP_011070708.1 |
| | dehydratase | | | |
| P14407 | Fumarate hydratase | 4.2.1.2; | Fumarate and derivatives | WP_000066707.1 |
| | class I, anaerobic | 4.2.1.81 | | |
| P0AC34 | Fumarate hydratase | 4.2.1.2; | Fumarate and derivatives | WP_000066639.1 |
| | class I, aerobic | 5.3.2.2 | | |
| Q2A1K3 | Aconitate hydratase A | 4.2.1.3; | lisocitrate and derivatives | WP_003017291.1 |
| Q8XBK7 | L(+)-tartrate | 4.2.1.32 | Oxaloactetate and derivatives | WP_000986788.1 |
| | dehydratase subunit alpha | | | |
| Q8U0C0 | 3-isopropylmalate | 4.2.1.33 | Isopropyl malate and derivatives | WP_011012825.1 |
| | dehydratase large | | | |
| | subunit | | | |
| P81291 | Isopropylmalate/ | 4.2.1.35; | Isopropyl malate and derivatives | WP_010870000.1 |
| | citramalate isomerase | 4.2.1.31 | | |
| | large subunit | | | |
| P71349 | L-serine dehydratase | 4.3.1.17 | Serine and derivatives | WP_005693026.1 |
| A9A9J5 | L-cysteine desulfidase | 4.4.1.28 | L-cysteine and derivatives | WP_012193958.1 |
| Q53U14 | Neomycin C epimerase | 5.1.3.— | Neomycin and derivatives | WP_031132490.1 |
| Q89B32 | L-lysine 2,3-aminomutase | 5.4.3.— | Beta-lysines and derivatives | WP_011091166.1 |
| Q8TUB9 | 3-methylornithine | 5.4.99.58 | Methyl-ornithine and derivatives | WP_011020212.1 |
| | synthase (Pyrrolysine) | | | |
| A0A084 | Xanthine dehydrogenase | 1.2.99.7; | Xanthines and derivatives | XP_016645868.1 |
| GFF7 | | 1.3.7.9 | | |
| Q0JCU7 | Zeaxanthin epoxidase | 1.14.15.21 | Xanthine and derivatives | XP_015636352.1 |
| P47990 | Xanthine | 1.17.1.4; | Xanthine and derivatives | NP_990458.1 |
| | dehydrogenase/oxidase | 1.17.3.2 | | |
| Q07973 | Vitamin D3 hydroxylase | 1.14.15.16 | Vitamin D and derivatives | XP_016883182.1 |
| O35084 | Vitamin D3 hydroxylase | 1.14.15.18 | Vitamin D and derivatives | NP_034139.2 |
| P18326 | Vitamin D3 dihydroxylase | 1.14.15.22 | Vitamin D and derivatives | — |
| P12609 | Vanillate O-demethylase | 1.14.13.82 | Vanilin and derivatives | — |
| | oxygenase | | | |
| Q3C1D2 | Terephthalate 1,2- | 1.14.12.15 | Terephtalate and derivatives | — |
| | dioxygenase | | | |
| O52379 | Salicylate 5-hydroxylas | 1.14.13.172 | Salicylate and derivatives | — |
| P51135 | Cytochrome b-c1 | 1.10.2.2 | Quinones and derivatives | NP_001312589.1 |
| | complex subunit | | | |
| | Rieske-5 | | | |
| O87605 | Cytochrome P450 | 1.14.15.33 | Pikromycin and derivatives | — |
| | monooxygenase PikC | | | |
| Q05183 | Phthalate 4,5- | 1.14.12.7 | Phthalate and derivatives | — |
| | dioxygenase | | | |
| | oxygenase subunit | | | |
| Q52185 | Phenoxybenzoate | 1.14.12.— | Phenoxybenzoate and derivatives | — |
| | dioxygenase | | | |
| Q0QLF3 | Nicotinate | 1.17.1.5 | Nicotinate and derivatives | — |
| | dehydrogenase small | | | |
| | FeS subunit | | | |
| Q9X404 | Methanesulfonate | 1.14.13.111 | Methanesulfonate and derivatives | — |
| | monooxygenase | | | |
| | hydroxylase | | | |
| Q0QLF7 | 6-hydroxynicotinate | 1.3.7.1 | Hydroxynicotinate and derivatives | — |
| | reductase | | | |
| A0A093 | Dimethyl sulfoxide | 1.8.5.3 | Dimethyl sulfoxide and derivatives | — |
| DJ52 | reductase | | | |
| Q02318 | Vitamin D3 25- | 1.14.15.15 | Steriods and derivatives | NP_000775.1 |
| | hydroxylase | | | |
| Q51601 | 2-halobenzoate 1,2- | 1.14.12.13 | Catechol or derivatives | — |
| | dioxygenase large | | | |
| | subunit | | | |
| P00183 | Camphor 5- | 1.14.15.1 | Camphor and derivatives | — |
| | monooxygenase | | | |
| P16640 | Putidaredoxin | 1.18.1.5 | Camphor and derivatives | — |
| | reductase CamA (Pdr) | | | |
| H9N289 | Methylxanthine N1- | 1.14.13.178 | Caffeine and derivatives | — |
| | demethylase NdmA | | | |
| Q8G907 | Butirosin biosynthesis | 1.1.99.38 | Butirosin or derivatives | — |
| | protein N | | | |
| P54973 | Beta-carotene | 1.14.15.24 | beta-carotenes and derivatives | — |
| | hydroxylase | | | |
| Q8GMH2 | 2-amino-4- | 1.3.99.24 | Anthranilate and derivatives | — |
| | deoxychorismate | | | |
| | dehydrogenase | | | |
| Q5SK48 | Aminodeoxyfutalosine | 2.5.1.120 | Menaquinone and derivatives | |
| | synthase | | | |
| Q60AV6 | hopanoid C-3 methylase | 2.1.1.— | Hopanoid and derivatives | WP_010960068.1, |
| Q5SK48 | aminofutalosine | 2.5.1.120 | Futalosin and derivatives | WP_011172898.1, |
| | synthase (cofactor | | | |
| | biosynthesis | | | |
| | menaquinone via | | | |
| | futalosine) | | | |
| Q58826 | FO synthase, CofH | 2.5.1.147 | Cofactor F420 and derivatives | WP_010870949.1, |
| | subunit (cofactor | | | |
| | biosynthesis - F420) | | | |
| P69848 | GTP 3′,8-cyclase | 4.1.99.22 | GTP and derivatives | WP_000230173.1, |
| | (molybdenum cofactor) | | | |
| Q57888 | FO synthase, CofG | 4.3.1.32 | Cofactor F420 and derivatives | WP_064496498.1, |
| | subunit (cofactor | | | |
| | biosynthesis - F420) | | | |
| O31677 | 7-carboxy-7- | 4.3.99.3 | Guanine and derivatives | WP_003232460.1, |
| | deazaguanine (CDG) | | | |
| | synthase | | | |

[0087] A genetically modified regulatory sequence capable of enhancing expression of said endogenous gene encoding an Fe—S cluster polypeptide as compared to the native regulatory sequence of said endogenous gene includes both a promoter sequence (for example having a measured promoter strength of at least 370 AU (see definitions); or a RBS conferring increased transcription (see example 7).

### II A Genetically Modified Prokaryotic Cell for Production of Heme

[0088] According to a further embodiment, the present invention provides a genetically modified prokaryotic cell capable of producing enhanced levels of heme and hemoproteins. The prokaryotic cell is genetically modified to express a mutant IscR in substitution for a wild type IscR, as well as comprising a transgene or up-regulated endogenous hemN gene (i.e an endogenous hemN gene operably linked to a genetically modified regulatory sequence capable of enhancing expression of said endogenous gene, as described in section I) encoding a HemN polypeptide having oxygen-independent coproporphyrinogen III oxidase (EC: 1.3.98.3) activity. Optionally, the genetically modified prokaryotic cell may further comprise one or more additional transgenes or upregulated endogenous genes encoding polypeptides that catalyze additional steps in the heme pathway (FIG. 12). An increase in the levels of those polypeptides that catalyze steps in the heme pathway enhances the synthesis of both intermediates in the heme pathway, and the end product of the pathway (heme) in the prokaryotic cell. Optionally, the genetically modified prokaryotic cell may further comprise one or more additional transgenes or upregulated endogenous genes (as defined herein) encoding polypeptides that use heme as a cofactor for the production of heme-containing proteins as well as other molecules whose production is dependent on such hemoproteins, e.g. cytochrome P450s, catalases, peroxidases and myoglobins (FIG. 12B).

[0089] The mutant IscR polypeptide is derived from a wild-type member of a family of IscR polypeptides, whereby the mutant IscR as compared to a corresponding non-mutant IscR polypeptide has an increased apoprotein:holoprotein ratio in the cell. In a special embodiment the apoprotein:holoprotein ratio in the cell of the invention is increased by at least 10%, such as at least 20%, such as at least 30%, such as at least 40%, such as at least 50%, such as at least 60%, such as at least 80%, such as at least 100%, such as at least 150%, such as at least 200% compared to a corresponding cell with non-mutant IscR.

[0090] In one embodiment, mutant IscR polypeptide has an amino acid sequence comprising at least one amino acid modification (by substitution, addition or deletion), when compared to its wild-type parent IscR polypeptide and can only exit as an apoprotein. In one embodiment the amino acid sequence of a wild-type member of a family of IscR polypeptides has at least 70, 75, 80, 85, 90, 95, 96, 98, 100% amino acid sequence identity to a sequence selected from any one of: SEQ ID No.: 2, 4, 6, 8, 10, 12 and 14, 15-26. The amino acid sequence of the mutant IscR polypeptide according to the invention differs from the amino acid sequence of the corresponding wild-type IscR polypeptide from which it was derived by at least one amino acid substitution; wherein said substitution is selected from L15X, C92X, C98X, C104X, and H107X; wherein X, the substituting amino acid, is any amino acid other than the amino acid found at the corresponding position in the wild type IscR from which the mutant was derived.

[0091] In alternative embodiments, the amino acid substitution in the mutant IscR is selected from either L15X, wherein X is any amino acid other than L, more preferably X is selected from phenylalanine (F), tyrosine (Y), methionine (M) and tryptophan (W); C92X, wherein X is any amino acid other than C, more preferably X is selected from tyrosine (Y), alanine (A), methionine (M), phenylalanine (F) and tryptophan (W); C98X, wherein X is any amino acid other than C, more preferably X is selected from alanine (A), valine (V), isoleucine (I), leucine (L), phenylalanine (F) and tryptophan (W); Cys104X, wherein X is any amino acid other than C, more preferably X is selected from alanine (A), valine (V), isoleucine (I), leucine (L), phenylalanine (F), and tryptophan (W); and His107X, wherein X is any amino acid other than H, more preferably X is selected from alanine (A), tyrosine (Y), valine (V), isoleucine (I), and leucine (L). For example, the amino acid substitution in the mutant IscR may be selected from among L15F, C92Y, C92A, C98A, Cys104A, H107Y, and H107A.

[0092] The mutant IscR expressed by the genetically modified prokaryotic cell of the invention (instead of a wild type IscR), is encoded by a genetically modified gene, located in the genome of the cell, either on the chromosome or on a self-replicating plasmid. The genetically modified iscR gene in the chromosome can be located in the genome at the same position of the wild-type iscR gene in the native genome. The genome of the genetically modified prokaryotic cell of the invention lacks a native wild type iscR gene, since the native wild type iscR gene is either deleted or directly substituted by the genetically modified iscR gene. The promoter driving expression of the genetically modified iscR gene may be the native promoter of the wild type iscR gene from which the genetically modified iscR gene was derived or replaced by. Alternatively, the promoter may be a heterologous constitutive or inducible promoter. When the promoter is a heterologous constitutive promoter, then a suitable promoter includes: apFab family [SEQ ID Nos.:230-232] while a suitable inducible promoter includes: pBad (arabinose-inducible) [SEQ ID No.:38] and Lacl [SEQ ID No.:40]. Suitable terminators include members of the apFAB terminator family including [SEQ ID No.: 41].

[0093] A polypeptide having oxygen-independent coproporphyrinogen III oxidase synthase (EC: 1.3.98.3) activity, according to the invention, catalyzes the conversion of coproporphyrin III into protoporphyrinogen IX, consuming two molecules of the co-factor S-adenosyl-methionine (SAM) (see FIG. 12). The members of this family of HemN polypeptides are encoded by hemN genes found in bacteria belonging to a wide range of genera. The amino acid sequence of the polypeptide having oxygen-independent coproporphyrinogen III oxidase synthase (EC: 1.3.98.3) activity has at least 70, 75, 80, 85, 90, 95, 96, 98, 100% amino acid sequence identity to a sequence selected from any one of: SEQ ID No.:96 (origin: Escherichia coli); SEQ ID No.:97 (origin: Synechocystis sp.); SEQ ID No.: 98 (origin: Thermus Aquaticus); SEQ ID No.:99 (origin: Candidatus Heimdallarchaeota); SEQ ID No.:100 (origin: Cryomorphaceae bacterium); SEQ ID No.:101 (origin: Thermotoga neapolitana); SEQ ID No.:102 (origin: Rhodothermus marinus); SEQ ID No.:103 (origin: Aquifex aeolicus); SEQ ID No.:104 (origin: Cupriavidus necator); SEQ ID No.:105 (origin: Lactococcus lactis phingomonas paucimobilis); and SEQ ID No.:106 (origin: Bacillus subtilis).

[0094] The polypeptides that are encoded by additional transgenes or additional upregulated endogenous genes (as defined herein) in the genetically modified prokaryotic cell, and whose activity serves to enhance the synthesis of both intermediates and products of the heme pathway, are as follows:
[0095] a) a polypeptide having glutamyl-tRNA reductase activity (HemA; EC:1.2.1.70) activity; such as a polypeptide with an amino acid sequence having 80, 85, 90, 95 or 100% sequence identity to SEQ ID No.:107 (origin: Escherichia coli); or a heme feed-back insensitive mutant HemA polypeptide having a C170A substitution in SEQ ID No: 107;
[0096] b) a polypeptide having glutamate-1-semialdehyde 2,1-aminomutase activity (HemL; EC 5.4.3.8), such as a polypeptide with an amino acid sequence having 80, 85, 90, 95 or 100% sequence identity to SEQ ID No.:108 (origin: Escherichia coli);
[0097] c) a polypeptide having delta-aminolevulinic acid dehydratase activity (HemB; EC:4.2.1.24) such as a polypeptide with an amino acid sequence having 80, 85, 90, 95 or 100% sequence identity to SEQ ID No.:109 (origin: Escherichia coli);
[0098] d) a polypeptide having porphobilinogen deaminase activity (HemC; EC:2.5.1.61), such as a polypeptide with an amino acid sequence having 80, 85, 90, 95 or 100% sequence identity to SEQ ID No.:110 (origin: Escherichia coli);
[0099] e) a polypeptide having uroporphyrinogen III methyltransferase activity (HemD; EC:4.2.1.75) such as a polypeptide with an amino acid sequence having 80, 85, 90, 95 or 100% sequence identity to SEQ ID No.:111 (origin: Escherichia coli);
[0100] f) a polypeptide having uroporphyrinogen decarboxylase activity (HemE; EC 4.1.1.37); such as a polypeptide with an amino acid sequence having 80, 85, 90, 95 or 100% sequence identity to SEQ ID No.:112 (origin: Escherichia coli);
[0101] g) a polypeptide having protoporphyrinogen IX dehydrogenase (menaquinone) activity (HemG; EC: 1.3.5.3); such as a polypeptide with an amino acid sequence having 80, 85, 90, 95 or 100% sequence identity to SEQ ID No.:113 (origin: Escherichia coli); and
[0102] h) a polypeptide having protoporphyrin ferrochelatase activity (HemH; EC: 4.99.1.1); such as a polypeptide with an amino acid sequence having 80, 85, 90, 95 or 100% sequence identity to SEQ ID No.:114 (origin: Escherichia coli).

[0103] The genetically modified prokaryotic cell of the invention can also make use of heme as a cofactor for the production of heme-containing proteins or molecules whose production is dependent on hemoproteins. Such hemoproteins include the enzymes: cytochrome P450 monooxygenase (EC: 1.14.-.-); polypeptides having Fe—S clusters (EC: 1.14.15.-), peroxidase (EC: 1.11.1.-), perooxygenase (EC: 1.11.2.-), catechol oxidase (EC: 1.10.3.-), hydroperoxide dehydratase (EC: 4.2.1.-), tryptophan 2,3-dioxygenase (EC: 1.13.11.-), and cytochrome c oxidase (EC: 1.9.3.-). Additionally, the hemoproteins myoglobin, hemoglobin, neuroglobin, cytoglobin, leghemoglobin can be produced using the genetically modified prokaryotic cell of the invention.

[0104] Accordingly, the prokaryotic cell may comprise transgenes or upregulated endogenous genes (as defined herein) encoding a HemN polypeptide, and preferably also a HemB polypeptide, as well as comprising one or more additional transgenes or upregulated endogenous genes (as defined herein) encoding such hemopolypeptides. For example, cytochrome P450s catalyze the stereoselective insertion of two hydroxy groups into indole in two consecutive enzymatic steps into cis-indole-2,3-dihydrodiol, which spontaneously oxidizes to indigo. Accordingly, in one embodiment the cytochrome P450 comprises a monooxygenase, e.g. BM3 having monooxygenase activity (EC: 1.14.14.1), which is a self-sufficient enzyme composed of a single polypeptide with a heme domain and a reductase domain having NAD(P)H reductase activity (EC: 1.6.2.4).

[0105] A P450-BM3 polypeptide having monooxygenase activity (EC: 1.14.14.1) and NAD(P)H reductase activity (EC: 1.6.2.4), is characterized by an amino acid sequence having at least 70, 75, 80, 85, 90, 95, 96, 98, 100% amino acid sequence identity to: SEQ ID No.: 115 (origin: Bacillus megaterium). The amino acid sequence of a mutant derivative of said P450-BM3 (called P450-BM3*) has the following amino acid mutations: A74G, F87V, L188Q and V445A; which enable P450 BM3* to oxidise indole into indigo.

[0106] When the gene(s) encoding HemN together with any additional polypeptides that catalyze the above listed additional steps in the heme pathway, as well as any cytochrome P450 polypeptide, are transgenes, they are located in the genome of the genetically modified prokaryotic cell, either integrated into the cell chromosome or on a self-replicating plasmid. The transgenes encoding said heme pathway enzymes (HemALBCDEGH) and/or cytochrome P450 polypeptide may be present in the genome within one or more operon.

[0107] The promoter driving expression of the transgenes is preferably a non-native promoter, which may be a heterologous constitutive-promoter or an inducible-promoter. When expression driven by the promoter is constitutive, then a suitable promoter includes apFab family [SEQ ID Nos.:93] while a suitable inducible promoter includes: pBad (arabinose-inducible) [SEQ ID No.:38] and lac promoter lac p, which is regulated by repressor lacl [SEQ ID No.:40]. Suitable terminators include members of the apFAB terminator family including [SEQ ID No.: 41]. The selected promoter and terminator may be operably linked to the coding sequence for HemN; and to the coding sequences of the one or more coding sequences for the HemA, L, C, B, C, D, E, G, and H polypeptides and cytochrome P450 polypeptide or may be operably linked to the one or more operon encoding the selected Hem polypeptides.

### III A Method for Producing and Detecting Heme Using a Genetically Modified Bacterium According to the Invention

[0108] Heme can be produced and exported using genetically modified prokaryotic cells of the invention (e.g. genetically modified E. coli cells) by introducing the cells into a culture medium suitable for supporting growth as well as comprising a carbon source suitable for the biosynthesis of heme; and finally recovering the heme produced by the culture, as illustrated in Example 3, FIG. 12A.

[0109] The genetically modified prokaryotic cells of the invention comprising a transgene encoding a HemN polypeptide, and preferably a transgene encoding HemB, will produce enhanced levels of heme when the supplied carbon source includes aminolaevulinic acid (ALA). When the genetically modified prokaryotic cells of the invention additionally comprise transgenes encoding each of HemA, L, C, B, C, D, E, G, and H polypeptides, they will produce heme when the supplied carbon source is selected from among glucose, maltose, galactose, fructose, sucrose, arabinose, xylose, raffinose, mannose, and lactose (example 3, FIG. 12A).

[0110] A method for producing and quantifying heme and porphyrin produced by a genetically modified prokaryotic cell of the invention is described in example 3.01. Production of heme under anaerobic conditions, employing the HemN catalyzed pathway has the additional advantage of (i) reducing equipment cost (air compressor, gas processing); (ii) reducing electricity cost (air management, reduced stirring needs, reducing cooling); and (iii) reducing contamination risks due to unfavorable conditions for opportunistic organisms.

### IV A Genetically Modified Prokaryotic Cell for Production of Vitamin B₃ Complex: Nicotinamide Riboside (NR), Nicotinic Acid (NA), Nicotinamide (NA), Nicotinamide Mononucleotide (NMN), Nicotinamide Adenine Dinucleotide (NAD), or the Intermediate Quinolate

[0111] According to a further embodiment, the present invention provides a genetically modified prokaryotic cell capable of producing enhanced levels of B₃ vitamins and/or the intermediate quinolate. The prokaryotic cell is genetically modified to express a mutant IscR, according to the invention (see Section I and II), in substitution for a wild type IscR, as well as comprising a transgene or up-regulated nadA endogenous gene (i.e an endogenous nadA gene operably linked to a genetically modified regulatory sequence capable of enhancing expression of said endogenous gene, as described in section I) encoding a NadA polypeptide having quinolate synthase activity (EC: 2.5.1.72). NadA is an [4Fe-4S] cluster-dependent enzyme that catalyzes the condensation and cyclisation of 2-iminosuccinate with dihydroxyacetone to synthesize quinolate (FIG. 13). The growth of cells over-expressing this enzyme is shown to be dependent on an increased supply of [4Fe-4S] clusters provided in cells expressing the mutant IscR (Example 4, FIG. 14). Genetically modified prokaryotic cells of the invention that further comprise an additional transgenes encoding a NadE* polypeptide having nicotinic acid mononucleotide amidating activity are able to synthesize both quinolate and NR. Additionally, including one or more of the transgenes with NMN nucleosidase activity (EC: 3.2.2.14) and pncA with nicotinamide deamidase activity (EC: 3.5.1.19) will allow the cells to synthesize both NA and NAM (FIG. 13). Optionally, the cells may comprise one of more transgenes or upregulated endogenous genes (as defined herein) encoding polypeptides that catalyze other steps in the NR synthesis pathway (FIG. 13), such as a NadB polypeptide having aspartate oxidase activity (EC: 1.4.3.16). Preferably, the NAD salvage pathway is down-regulated, for example by deletion or inactivation of the nadR and/or pncC genes in the genetically modified prokaryotic cell, thereby reducing NR consumption.

[0112] An increase in the levels of those polypeptides that catalyze steps in the NR pathway enhances the synthesis of both intermediates and end products of the NR pathway in the prokaryotic cell.

[0113] Polypeptides having quinolate synthase activity (EC: 2.5.1.72) are encoded by genes found in a wide range of bacteria and plants belonging to a wide range of genera. The amino acid sequence of the NadA polypeptide having quinolate synthase activity has at least 70, 75, 80, 85, 90, 95, 96, 98, 100% amino acid sequence identity to a sequence selected from any one of: SEQ ID No.: 117 (origin: Escherichia coli); SEQ ID No.: 118 (origin: Thermotoga maritima); SEQ ID No.: 119 (origin: Acidobacterium capsulatum); SEQ ID No.: 120 (origin: Aquifex aeolicus); SEQ ID No.: 121 (origin: Bacillus subtilis); SEQ ID No.: 122 (origin: Corynebacterium glutamicum) SEQ ID No.: 123 (origin: Pseudomonas putida); SEQ ID No.: 124 (origin: Sulfolobus solfataricus); SEQ ID No.: 125 (origin: Synechococcus elongatus); SEQ ID No.: 126 (origin: Thermus thermophilus); and SEQ ID No.: 127 (origin: Arabidopsis thaliana).

[0114] The polypeptides that are encoded by the additional transgenes or upregulated endogenous genes in the genetically modified prokaryotic cell, and whose activity serves to enhance the synthesis of both intermediates and products of the NR pathway, are as follows:
[0115] a) a NadB polypeptide having aspartate oxidase activity (synthesizes iminoaspartate from L-aspartate (EC: 1.4.3.16); such as a polypeptide with an amino acid sequence having 80, 85, 90, 95 or 100% sequence identity to SEQ ID No.:128 (origin: Escherichia coli);
[0116] b) a NadC polypeptide having nicotinate-nucleotide pyrophosphorylase (EC: 2.4.2.19); such as a polypeptide with an amino acid sequence having 80, 85, 90, 95 or 100% sequence identity to SEQ ID No.:133 (origin: Escherichia coli);
[0117] c) a NadE* polypeptide having NH(3)-dependent NAD(+) synthetase activity (EC: 6.3.1.5), such as a polypeptide with an amino acid sequence having 80, 85, 90, 95 or 100% sequence identity to SEQ ID No.:129 (origin: Mannheimia succiniciproducens;
[0118] d) an AphA polypeptide having Class B acid phosphatase; such as a polypeptide with an amino acid sequence having 80, 85, 90, 95 or 100% sequence identity to SEQ ID No.:130 (Origin E. coli)
[0119] e) a PncA polypeptide having nicotinamide deamidase activity (EC: 3.5.1.19); such as a polypeptide with an amino acid sequence having 80, 85, 90, 95 or 100% sequence identity to SEQ ID No.:131 (origin: Escherichia coli); and
[0120] f) a Chi polypeptide having nucleosidase NMN nucleosidase activity (EC: 3.2.2.14); such as a polypeptide with an amino acid sequence having 80, 85, 90, 95 or 100% sequence identity to SEQ ID No.:132;
[0121] g) When the gene(s) encoding quinolate synthase together with one or more additional polypeptides that catalyze additional steps in the quinolate and B₃ vitamins pathways are transgenes, they are located in the genome of the genetically modified prokaryotic cell, either integrated into the prokaryotic cell chromosome or on a self-replicating plasmid. The transgene encoding NadA and one or more of the transgenes (nadB, and nadE) encoding enzymes in the NR pathway enzymes may be present in the genome within one or more operon.

[0122] The promoter driving expression of the transgene encoding NadB and one or more additional transgenes is preferably a non-native promoter, which may be a heterologous constitutive-promoter or an inducible-promoter. When expression driven by the promoter is constitutive, then a suitable promoter includes apFab family [SEQ ID Nos.:97] while a suitable inducible promoter includes: pBad (arabinose-inducible) [SEQ ID No.:38] and lac promoter lac p, which is regulated by repressor lacl [SEQ ID No.:40]. Suitable terminators include members of the apFAB terminator family including [SEQ ID No.: 41]. The selected promoter and terminator may be operably linked to the respective gene, either to provide individual gene regulation or for regulation of an operon.

### V A Method for Producing and Detecting B3 Vitamins and the Intermediate Quinolate Using a Genetically Modified Bacterium to the Invention

[0123] B₃ vitamins and quinolate can be produced using genetically modified prokaryotic cells of the invention (e.g. genetically modified E. coli cells) by introducing the cells into a suitable culture medium; and finally recovering the said products of the cells, as illustrated in the example 4.

[0124] The genetically modified prokaryotic cells of the invention comprising a transgene encoding a quinolate synthase (NadB) will produce quinolate when supplied with a suitable carbon source for example a source selected from among glucose, maltose, galactose, fructose, sucrose, arabinose, xylose, raffinose, mannose, and lactose.

[0125] A method for quantifying cellular quinolate and NR produced by a genetically modified prokaryotic cell of the invention is described in example 4.

### VI A Genetically Modified Prokaryotic Cell for Production of Cobalamin

[0126] According to a further embodiment, the present invention provides a genetically modified prokaryotic cell capable of producing enhanced levels of cobalamin. The prokaryotic cell is genetically modified to express a mutant IscR, according to the invention (see section I and II), in substitution for a wild type IscR, as well as comprising a transgene or up-regulated endogenous cobG gene (i.e an endogenous cobG gene operably linked to a genetically modified regulatory sequence capable of enhancing expression of said endogenous gene, as described in section 1) encoding a CobG polypeptide having precorrin-38 synthase (EC: 1.3.98.3).

[0127] CobG is an [4Fe-4S] cluster-dependent enzyme that catalyzes the conversion of precorrin-3-A to Precorrin-3-B, using dioxygen (O2) and nicotinamide adenine dinucleotide (NADH) as co-factors (FIG. 15). The growth of cells over-expressing this enzyme is dependent on an increased supply of [4Fe-4S] clusters provided in cells expressing the mutant IscR (Example 5). Genetically modified prokaryotic cells of the invention that further comprise an additional transgene or additional upregulated endogenous genes (as defined herein) encoding polypeptides CobIMFKHU are able to enhance flux through the pathway, and production of the intermediate hydrogenobyrinic acid (HBA). Cells of the invention that further comprise transgenes encoding polypeptides that catalyze the subsequent steps in the cob synthesis pathway (FIG. 15), in particular genes encoding CobNST, CobC, CobD, CobT, PduX, CobU, CobS, CbiB, CbiN, CbiQ, CbiO, and CbiM are able to produce cobalamin.

[0128] CobG polypeptides having precorrin-38 synthase (EC: 1.14.13.83) are encoded by genes found in a wide range of microorganisms belonging to a wide range of genera. The amino acid sequence of the polypeptide having precorrin-3B synthase activity has at least 70, 75, 80, 85, 90, 95, 96, 98, 100% amino acid sequence identity to a sequence selected from any one of: SEQ ID No.: 135 (origin: Pseudomonas denitrificans); SEQ ID No.: 136 (origin: Corynebacterium glutamicum); SEQ ID No.: 137 (origin: Frankia canadensis); SEQ ID No.: 138 (origin: Nostoc sp. CENA543); SEQ ID No.: 139 (origin: Rhizobium leguminosarum); SEQ ID No.: 140 (origin: Mycoplana dimorpha) SEQ ID No.: 141 (origin: Rhodobacter sphaeroides); SEQ ID No.: 142 (origin: Granulicella tundricola); SEQ ID No.: 143 (origin: Sinorhizobium meliloti); SEQ ID No.: 144 (origin: Streptomyces cattleya); and SEQ ID No.: 145 (origin: Pannonibacter phragmitetus).

[0129] The polypeptides that are encoded by the additional transgenes or upregulated endogenous genes (as defined herein) in the genetically modified prokaryotic cell, and whose activity serves to enhance the synthesis of both intermediates of the Cob pathway, are as follows:
[0130] a) a CobI polypeptide having precorrin-2 C20-methyltransferase activity (EC: 2.1.1.130), catalyses the synthesis of precorrin-3A from precorrin-2, such as a polypeptide with an amino acid sequence having 80, 85, 90, 95 or 100% sequence identity to SEQ ID No.: 146 (origin: Pseudomonas denitrificans);
[0131] b) a CobM polypeptide having precorrin-3 methylase activity (EC: 2.1.1.133), catalyses the synthesis of precorrin-5 from precorrin-4, such as a polypeptide with an amino acid sequence having 80, 85, 90, 95 or 100% sequence identity to SEQ ID No.:147 (origin: Pseudomonas denitrificans);
[0132] c) a CobF polypeptide having cobalt-precorrin-6A synthase activity (EC: 2.1.1.195), catalyses the synthesis of precorrin-6A from precorrin-58, such as a polypeptide with an amino acid sequence having 80, 85, 90, 95 or 100% sequence identity to SEQ ID No.:148 (origin: Pseudomonas denitrificans);
[0133] d) a CobK polypeptide having precorrin-6A reductase activity (EC: 1.3.1.54), catalyses the synthesis of precorrin-6B from precorrin-6A, such as a polypeptide with an amino acid sequence having 80, 85, 90, 95 or 100% sequence identity to SEQ ID No.:149 (origin: Pseudomonas denitrificans);
[0134] e) a CobH polypeptide having precorrin isomerase activity (EC: 5.4.99.61), catalyses the conversion of precorrin-8X to hydrogenobyrinate, such as a polypeptide with an amino acid sequence having 80, 85, 90, 95 or 100% sequence identity to SEQ ID No.:150 (origin: Pseudomonas denitrificans);
[0135] f) a CobL polypeptide having Precorrin-6Y C(5,15)-methyltransferase activity (EC: 2.1.1.132), catalyses the conversion of C-5 and C-15 in precorrin-6Y to form precorrin-8X, such as a polypeptide with an amino acid sequence having 80, 85, 90, 95 or 100% sequence identity to SEQ ID No.:151 (origin: Pseudomonas denitrificans);
[0136] g) a CobJ polypeptide having Precorrin-3B C(17)-methyltransferase (EC: 2.1.1.131), catalyses the methylation of precorrin-3B to form precorrin-4, such as a polypeptide with an amino acid sequence having 80, 85, 90, 95 or 100% sequence identity to SEQ ID No.:152 (origin: Pseudomonas denitrificans);
[0137] h) The polypeptides that are encoded by additional transgenes or upregulated endogenous genes (as defined herein) in the genetically modified prokaryotic cell, include those whose activity serves to complete the pathway and permit production of cobalamin, are as follows:
[0138] i) j) a CobN, CobS and CobT are polypeptide subunits of an enzyme having aerobic cobaltochelatase activity (EC: 6.6.1.2), which catalyzes cobalt insertion in the corrin ring, such as a polypeptide with an amino acid sequence having 80, 85, 90, 95 or 100% sequence identity to SEQ ID No.:153, 154 and 155 respectively (origin: Brucella melitensis).
[0139] j) K) CobR polypeptide having 4-hydroxyphenylacetate 3-monooxygenase activity (EC: 1.14.14.9) wherein the amino acid sequence of the polypeptide has 80, 85, 90, 95 or 100% sequence identity to SEQ ID No.:156, (origin:Brucella melitensis);
[0140] k) l) CobO polypeptide having corrinoid adenosyltransferase activity (EC: 2.5.1.17) synthesizes adenosylcobalamin from cob(II)yrinate a,c-diamide, wherein the amino acid sequence of the polypeptide has 80, 85, 90, 95 or 100% sequence identity to SEQ ID No.:157, (origin: Pseudomonas denitrificans);
[0141] l) m) CobQ polypeptide having cobyric acid synthase activity (EC: 6.3.5.10) catalyses aminidations of adenosylcobyrinic A,C-diamide, wherein the amino acid sequence of the polypeptide has 80, 85, 90, 95 or 100% sequence identity to SEQ ID No.:158, (origin: Pseudomonas denitrificans); m) n) BtuR polypeptide having corrinoid adenosyltransferase (EC: 2.5.1.17), wherein the amino acid sequence of the polypeptide has 80, 85, 90, 95 or 100% sequence identity to SEQ ID No.:159, (origin E. coli);
[0142] n) o) CobU polypeptide having bifunctional adenosylcobalamin biosynthesis 4-hydroxyphenylacetate 3-monooxygenase activity (EC: 2.7.1.156), wherein the amino acid sequence of the polypeptide has 80, 85, 90, 95 or 100% sequence identity to SEQ ID No.:160, (origin: E. coli);
[0143] o) p) CobD, polypeptide having threonine-phosphate decarboxylase activity (EC: 4.1.1.81) that decarboxylates L-threonine-O-3-phosphate to yield (R)-1-amino-2-propanol 0-2-phosphate, the precursor for the linkage between the nucleotide loop and the corrin ring in cobalamin, wherein the amino acid sequence of the polypeptide has 80, 85, 90, 95 or 100% sequence identity to SEQ ID No.:161, (origin: Salmonella typhimurium);
[0144] p) q) CobC polypeptide having Adenosylcobalamin/alpha-ribazole phosphataseactivity (EC: 3.1.3.73) converting adenosylcobalamin 5′-phosphate to adenosylcobalamin, wherein the amino acid sequence of the polypeptide has 80, 85, 90, 95 or 100% sequence identity to SEQ ID No.:162, (origin: E. coli);
[0145] q) r) CobT polypeptide having Nicotinate-nucleotide-dimethylbenzimidazole phosphoribosyltransferase activity (EC: 2.4.2.21), wherein the amino acid sequence of the polypeptide has 80, 85, 90, 95 or 100% sequence identity to SEQ ID No.:163, (origin: E. coli);
[0146] r) r) CobS polypeptide having Adenosylcobinamide-GDP ribazoletransferase activity (EC: 2.7.8.26), wherein the amino acid sequence of the polypeptide has 80, 85, 90, 95 or 100% sequence identity to SEQ ID No.:164, (origin: E. coli;
[0147] s) r) CbiB polypeptide having cobalamin biosynthesis activity (EC: 6.3.1.10) converting cobyric acid into cobinamide, wherein the amino acid sequence of the polypeptide has 80, 85, 90, 95 or 100% sequence identity to SEQ ID No.:165, (origin: Salmonella typhimurium);
[0148] t) s) PduX polypeptide having L-threonine kinase activity (EC: 2.7.1.177) converting L-threonine to L-threonine-O-3-phosphate, wherein the amino acid sequence of the polypeptide has 80, 85, 90, 95 or 100% sequence identity to SEQ ID No.:166, (origin: Salmonella typhimurium); u) t) CbiN is a polypeptide having the function of a cobalt transport protein; wherein the amino acid sequence of the polypeptide has 80, 85, 90, 95 or 100% sequence identity to SEQ ID No.:167, (origin: Salmonella typhimurium); and
[0149] v) u) ChiQ is a polypeptide having the function of a cobalt transport protein; wherein the amino acid sequence of the polypeptide has 80, 85, 90, 95 or 100% sequence identity to SEQ ID No.:168, (origin: Salmonella typhimurium);
[0150] w) v) CbiM is a polypeptide having the function of a cobalt transport protein; wherein the amino acid sequence of the polypeptide has 80, 85, 90, 95 or 100% sequence identity to SEQ ID No.:169, (origin: Salmonella typhimurium); and
[0151] w) CbiO polypeptide having cobalt import ATP-binding protein activity (EC: 3.6.3.-); wherein the amino acid sequence of the polypeptide has 80, 85, 90, 95 or 100% sequence identity to SEQ ID No.:170, (origin: Salmonella typhimurium).

[0152] When the gene(s) encoding the CobG polypeptide, precorrin-3B synthase, together with one or more additional polypeptides that catalyze additional steps in the Cob pathway are transgenes, they are located in the genome of the genetically modified prokaryotic cell, either integrated into the prokaryotic cell chromosome or on a self-replicating plasmid. The transgene encoding CobG and one or more of the transgenes Cob pathway enzymes may be present in the genome within one or more operon.

[0153] The promoter driving expression of the transgene encoding CobG and one or more additional transgenes is preferably a non-native promoter, which may be a heterologous constitutive-promoter or an inducible-promoter. When expression driven by the promoter is constitutive, then a suitable promoter includes apFab family [SEQ ID Nos.:97] while a suitable inducible promoter includes: pBad (arabinose-inducible) [SEQ ID No.:38] and lac promoter lac p, which is regulated by repressor lacl [SEQ ID No.:40]. Suitable terminators include members of the apFAB terminator family including [SEQ ID No.: 98]. The selected promoter and terminator may be operably linked to the respective gene, either to provide individual gene regulation or for regulation of an operon.

### VII A Method for Producing and Detecting Cobalamin Using a Genetically Modified Bacterium According to the Invention

[0154] Cobalamin can be produced using genetically modified prokaryotic cells of the invention (e.g. genetically modified E. coli cells) by introducing the cells into a suitable culture medium; and finally recovering the cobalamin, as illustrated in the Example 5. A suitable culture medium includes a carbon source selected from among glucose, maltose, galactose, fructose, sucrose, arabinose, xylose, raffinose, mannose, and lactose.

[0155] A method for quantifying cobalamin produced by a genetically modified prokaryotic cell of the invention is described in example 5; and may include the use of High Pressure Liquid Chromatography, relative to a cobalamin standard.

### VIII A Genetically Modified Prokaryotic Cell for Production of Pantothenic Acid and Branched Chain Amino Acids

[0156] According to a further embodiment, the present invention provides a genetically modified prokaryotic cell capable of producing enhanced levels of the branched chain amino acids L-valine, L-leucine and L-isoleucine and vitamin B₅ (pantothenate). The prokaryotic cell is genetically modified to express a mutant IscR, according to the invention (see section I and II), in substitution for a wild type IscR, as well as comprising a transgene or up-regulated endogenous ilvD gene (i.e an endogenous ilvD gene operably linked to a genetically modified regulatory sequence capable of enhancing expression of said endogenous gene, as described in section I) encoding a IlvD polypeptide having dihydroxy-acid dehydratase activity (EC: 4.2.1.9).

[0157] IlvD is an [4Fe-4S] cluster-dependent enzyme that catalyzes the dehydration of 2,3-dihydroxy-3-methylbutanoate into 3-methyl-2-oxobutanoate (FIG. 16A) as well as the dehydration of 2,3-dihydroxy-3-methylpentanoate into 3-methyl-2-oxopentanoate (FIG. 16B). The growth of cells over-expressing this enzyme is dependent on an increased supply of [4Fe-4S] clusters provided in cells expressing the mutant IscR (Example 6). Genetically modified prokaryotic cells of the invention that further comprise one or more additional transgenes encoding polypeptides IlvB, IlvBN and IlvC are capable of enhanced synthesis of both L-valine, L-leucine and L-isoleucine and pantothenate, due to enhanced flux through the ilv pathway (based on detectable levels of the intermediates 3-methyl-2-oxobutanoate and 3-methyl-2-oxopentanoate. Optionally, the cells may comprise one of more transgenes or upregulated endogenous genes (as defined herein) encoding polypeptides that catalyze other steps in the ilv pathway (FIG. 16), such as IlvE to further enhance L-valine production and IlvNbis to enhance flux into the Ilv pathway.

[0158] Additionally, the genetically modified cells of the invention may further comprise transgenes or upregulated endogenous genes (as defined herein) encoding the L-valine exporter ygaZH and global regulator leucine responsive protein (Lrp), to enhance net L-valine export.

[0159] Polypeptides having dihydroxy-acid dehydratase activity (EC: 4.2.1.9) are encoded by genes found in a wide range of microorganisms belonging to a wide range of genera. The amino acid sequence of the IlvD polypeptide having dihydroxy-acid dehydratase activity has at least 70, 75, 80, 85, 90, 95, 96, 98, 100% amino acid sequence identity to a sequence selected from any one of: SEQ ID No.: 172 (origin: E. coli); SEQ ID No.: 173 (origin: Acidobacterium capsulatum); SEQ ID No.: 174 (origin: Saccharomyces cerevisiae); SEQ ID No.: 175 (origin: Aquifex aeolicus); SEQ ID No.: 176 (origin: Bacillus subtilis); SEQ ID No.: 177 (origin: Corynebacterium glutamicum) SEQ ID No.: 178 (origin: Deinococcus radiodurans); SEQ ID No.: 179 (origin: Methanococcus maripaludis); SEQ ID No.: 180 (origin: Pseudomonas putida); SEQ ID No.: 181 (origin: Synechococcus elongatus); and SEQ ID No.: 182 (origin: Thermotoga maritima).

[0160] The polypeptides that are encoded by the additional transgenes in the genetically modified prokaryotic cell, and whose activity serves to enhance the synthesis of both intermediates and products of the ilv pathway, are as follows:
[0161] a) an IlvB polypeptide having acetolactate synthase isozyme 1 large subunit activity (EC: 2.2.1.6) and together with IlvN catalyses the conversion of pyruvate into (2S)-2-acetolactate; such as a polypeptide with an amino acid sequence having 80, 85, 90, 95 or 100% sequence identity to SEQ ID No.:183 (origin: E. coli);
[0162] b) an IlvN polypeptide having acetolactate synthase isozyme 1 small subunit activity (EC: 2.2.1.6) and together with IlvB catalyses the conversion of pyruvate into (2S)-2-acetolactate; such as a polypeptide with an amino acid sequence having 80, 85, 90, 95 or 100% sequence identity to SEQ ID No.:184 (origin: E. coli);
[0163] c) an IlvC polypeptide having ketol-acid reductoisomerase (NADP+) activity (EC: 1.1.1.86) catalyses the conversion of (2S)-2-acetolactate into (2S)-2-hydroxy-2-methyl-3-oxobutanoate; such as a polypeptide with an amino acid sequence having 80, 85, 90, 95 or 100% sequence identity to SEQ ID No.:185 (origin: E. coli);
[0164] d) an IlvE polypeptide having branched-chain-amino-acid aminotransferase activity (EC: 2.6.1.42), catalyses the synthesis of L-valine from 3-methyl-2-oxobutanoate, such as a polypeptide with an amino acid sequence having 80, 85, 90, 95 or 100% sequence identity to SEQ ID No.:186 (origin: E. coli).
[0165] e) an IlvNbis polypeptide (mutant IlvN polypeptide), said mutation enhancing acetolactate synthase isozyme 1 small subunit activity (EC: 2.2.1.6) and together with IlvB catalyses the conversion of pyruvate into (2S)-2-acetolactate; such as a polypeptide with an amino acid sequence having 80, 85, 90, 95 or 100% sequence identity to SEQ ID No.:187 (origin: E. coli);
[0166] f) a YgaZ and YgaH polypeptides, that together confer L-valine transmembrane transporter activity, such as polypeptides characterized by an amino acid sequence having 80, 85, 90, 95 or 100% sequence identity to SEQ ID No.:188 and 189 respectively (origin: E. coli);
[0167] g) a LrP polypeptide having leucine responsive regulator protein activity, such as a polypeptide with an amino acid sequence having 80, 85, 90, 95 or 100% sequence identity to SEQ ID No.:190 (origin: E. coli).

[0168] When the gene(s) encoding the IlvD polypeptide, dihydroxy-acid dehydratase activity, together with one or more additional polypeptides that catalyze additional steps in the ilv pathway (encoding IlvB, IlvN or IlvNbis, IlvC, and optionally IlvE) as well as polypeptides conferring net valine export (YgaZ, YgaH and LrP) are transgenes, they are located in the genome of the genetically modified prokaryotic cell, either integrated into the prokaryotic cell chromosome or on a self-replicating plasmid. The transgene encoding IlvD and one or more of the transgenes encoding liv pathway enzymes may be present in the genome within one or more operon.

[0169] The promoter driving expression of the transgene encoding IlvD and one or more additional transgenes is preferably a non-native promoter, which may be a heterologous constitutive-promoter or an inducible-promoter. When the promoter is a heterologous constitutive promoter, then a suitable promoter includes the apFab family [SEQ ID Nos.:97], while a suitable inducible promoter includes: pBad (arabinose inducible [SEQ ID No.:38] and Lac [SEQ ID No.:40]. Suitable terminators include members of the apFAB terminator family including [SEQ ID No.: 98]. The selected promoter and terminator may be operably linked to the respective gene, either to provide individual gene regulation or for regulation of an operon.

### IX A Method for Producing and Detecting Branched-Chain Amino Acids and Pantothenic Acid Using a Genetically Modified Bacterium According to the Invention

[0170] Branched chain amino acids (valine, leucine and isoleucine) as well as pantothenoate can be produced using genetically modified prokaryotic cells of the invention (e.g. genetically modified E. coli cells) by introducing the cells into a suitable culture medium; and finally recovering the synthesized products, as illustrated in the Example 6. A suitable culture medium includes a carbon source selected from among glucose, maltose, galactose, fructose, sucrose, arabinose, xylose, raffinose, mannose, and lactose.

[0171] A method for quantifying branched chain amino acids and pantothenate produced by a genetically modified prokaryotic cell of the invention is described in example 6.

[0172] The present invention provides a genetically modified prokaryotic cell capable of producing enhanced levels of the branched chain amino acids L-valine, L-leucine and L-isoleucine and vitamin B₅ (pantothenate).

### X A Genetically Modified Prokaryotic Cell for Production of Isoprenoids

[0173] According to a further embodiment, the present invention provides a genetically modified prokaryotic cell capable of producing enhanced levels of isoprenoids and the isoprenoid precursors isopentenyl diphosphate (IPP) and dimethylallyl diphosphate (DMAPP) via the MEP pathway (FIG. 18).

[0174] The prokaryotic cell is genetically modified to express a mutant IscR, according to the invention (see section I and II), in substitution for a wild type IscR, as well as comprising transgenes or up-regulated endogenous genes (i.e an endogenous genes operably linked to a genetically modified regulatory sequence capable of enhancing expression of said endogenous gene, as described in section 1) encoding an IspG polypeptide having 4-hydroxy-3-methylbut-2-en-1-yl diphosphate synthase (EC: 1.17.7.3) and an IspH polypeptide having 4-hydroxy-3-methylbut-2-enyl diphosphate reductase activity (EC: 1.17.7.4).

[0175] Both IspG and IspH are [4Fe-4S] cluster-dependent enzymes that catalyze the final two steps in the MEP pathway. IspG catalyzes the synthesis of HMBPP from MEcPP; while IspH catalyzes the synthesis of IPP and DMAPP in a 3:1 molar ratio from the substrate HMBPP.

[0176] Genetically modified prokaryotic cells of the invention that further comprise one or more additional transgenes or upregulated endogenous genes (as defined herein) encoding polypeptides are able to synthesize enhanced levels of both IPP and DMAPP.

[0177] IspG polypeptides having 4-hydroxy-3-methylbut-2-en-1-yl diphosphate synthase (EC: 1.17.7.3) are encoded by genes found in a wide range of microorganisms and plants belonging to a wide range of genera. The amino acid sequence of the polypeptide having 4-hydroxy-3-methylbut-2-en-1-yl diphosphate synthase activity has at least 70, 75, 80, 85, 90, 95, 96, 98, 100% amino acid sequence identity to a sequence selected from any one of: SEQ ID No.: 192 (origin: E. coli); SEQ ID No.: 193 (origin: Acidobacterium capsulatum); SEQ ID No.: 194 (origin: Aquifex aeolicus); SEQ ID No.: 195 (origin: Arabidopsis thaliana); SEQ ID No.: 196 (origin: Bacillus subtilis); SEQ ID No.: 197 (origin: Clostridium acetobutylicum) SEQ ID No.: 198 (origin: Corynebacterium glutamicum); SEQ ID No.: 199 (origin: Deinococcus radiodurans); SEQ ID No.: 200 (origin: Pseudomonas putida); and SEQ ID No.: 201 (origin: Synechococcus elongatus).

[0178] Correspondingly, IspH polypeptides having 4-hydroxy-3-methylbut-2-enyl diphosphate reductase activity (EC: 1.17.7.4) are encoded by genes found in a wide range of microorganisms and plants. The amino acid sequence of the polypeptide having 4-hydroxy-3-methylbut-2-enyl diphosphate reductase activity has at least 70, 75, 80, 85, 90, 95, 96, 98, 100% amino acid sequence identity to a sequence selected from any one of: SEQ ID No.: 203 (origin: E. coli); SEQ ID No.: 204 (origin: Acidobacterium capsulatum); SEQ ID No.: 205 (origin: Aquifex aeolicus); SEQ ID No.: 206 (origin: Arabidopsis thaliana); SEQ ID No.: 207 (origin: Bacillus subtilis); SEQ ID No.: 208 (origin: Clostridium acetobutylicum) SEQ ID No.: 209 (origin: Corynebacterium glutamicum); SEQ ID No.: 210 (origin: Deinococcus radiodurans); SEQ ID No.: 211 (origin: Pseudomonas putida); SEQ ID No.: 212 (origin: Synechococcus elongatus) and SEQ ID No.: 213 (origin: Thermotoga maritima).

[0179] The genetically modified prokaryotic cell may be further modified in order to overexpress one or more polypeptides whose activity serves to enhance the flux through the isoprenoid biosynthesis pathway and thereby enhance synthesis of both intermediates and products of the pathway, as follows:
[0180] a) DXS having 1-deoxy-D-xylulose-5-phosphate synthase (EC: 2.2.1.7), whose amino acid sequence has at least 70, 75, 80, 85, 90, 95, 96, 98, 100% amino acid sequence identity to a sequence selected from any one of: SEQ ID No.: 214 (origin: E. coli);
[0181] b) Ipi, having Isopentenyl-diphosphate Delta-isomerase EC:5.3.3.2, whose amino acid sequence has at least 70, 75, 80, 85, 90, 95, 96, 98, 100% amino acid sequence identity to a sequence selected from any one of: SEQ ID No.: 215 (origin: E. coli) and
[0182] b) IspC (dxr) 1-deoxy-D-xylulose 5-phosphate reductoisomerase (EC: 1.1.1.267), whose amino acid sequence has at least 70, 75, 80, 85, 90, 95, 96, 98, 100% amino acid sequence identity to a sequence selected from any one of: SEQ ID No.: 216 (origin: E. coli)
[0183] c) RpoS having the function of an RNA polymerase subunit sigma factor σ, whose amino acid sequence has at least 70, 75, 80, 85, 90, 95, 96, 98, 100% amino acid sequence identity to a sequence selected from any one of: SEQ ID No.: 217 (origin: E. coli)

[0184] Optionally the genetically modified prokaryotic cell may be further modified in order to delete the ytjC gene encoding a phosphoglycerate mutase enzyme (EC: 5.4.2.-) in order to increase metabolic flux through the isoprenoid biosynthesis pathway.

[0185] When the genes encoding the IspG and IspH polypeptides, together with one or more additional polypeptides that catalyze additional steps that enhance synthesis of isoprenoids and their precursors IPP and DMAPP are transgenes, they are located in the genome of the genetically modified prokaryotic cell, either integrated into the prokaryotic cell chromosome or on a self-replicating plasmid. The transgene encoding IspG and IspH and one or more of the transgenes encoding other MEP pathway enzymes may be present in the genome within one or more operon.

[0186] The promoter driving expression of the transgene encoding IspG and IspH and one or more additional transgenes is preferably a non-native promoter, which may be a heterologous constitutive-promoter or an inducible-promoter. When expression driven by the promoter is constitutive, then a suitable promoter includes apFab family [SEQ ID Nos.:97] while a suitable inducible promoter includes: pBad (arabinose-inducible) [SEQ ID No.:38] and lac promoter lac p, which is regulated by repressor lacl [SEQ ID No.:40]. Suitable terminators include members of the apFAB terminator family including [SEQ ID No.: 98]. The selected promoter and terminator may be operably linked to the respective gene, either to provide individual gene regulation or for regulation of an operon.

XI A Method for Producing Isoprenoid Precursors and their Derivatives Using a Genetically Modified Bacterium of the Invention

[0187] The isoprenoid precursors IPP and DMAPP and their derivatives can be produced using genetically modified prokaryotic cell s of the invention (e.g. genetically modified E. coli cells) by introducing the cells into a suitable culture medium; and finally recovering the isoprenoid precursors or their derivatives, as illustrated in the Example 7. A suitable culture medium includes a carbon source selected from among glucose, maltose, galactose, fructose, sucrose, arabinose, xylose, raffinose, mannose, and lactose.

[0188] A method for quantifying IPP and DMAPP produced by a genetically modified prokaryotic cell of the invention is described in example 7.

[0189] The present invention provides a genetically modified prokaryotic cell capable of producing enhanced levels of the IPP and DMAPP as well as their isoprenoid derivatives.

### XII A Genetically Modified Prokaryotic Cell for Production of L-Glutamic Acid and δ-Aminolevulinic Acid

[0190] Micro-organisms can produce L-glutamic acid by means of the glutamine synthase-glutamate synthase (glutamine:2-oxoglutarate aminotransferase (GS-GOGAT) pathway, particularly at low ammonia concentrations. The present invention provides a genetically modified prokaryotic cell capable of producing enhanced levels of the L-glutamic acid via the GS-GOGAT pathway as well as δ-aminolevulinic acid (ALA) (FIG. 19). The prokaryotic cell is genetically modified to express a mutant IscR, according to the invention (see section I and II), in substitution for a wild type IscR, as well as comprising transgenes or up-regulated endogenous genes (i.e endogenous genes operably linked to a genetically modified regulatory sequence capable of enhancing expression of said endogenous gene, as described in section 1) encoding a GltB polypeptide having glutamate synthase [NADPH] large chain, (EC: 1.4.1.13) and glutamate synthase [NADPH] small chain, GltD (EC: 1.4.1.13).

[0191] The small and large chain polypeptides, GltB and GltD, together form the [4Fe-4S] cluster-dependent enzyme, GOGAT that catalyze GS-GOGAT reaction.

[0192] A GltB polypeptide comprising the glutamate synthase [NADPH] large chain of GOGAT, (EC: 1.4.1.13) has an amino acid sequence having at least 70, 75, 80, 85, 90, 95, 96, 98, 100% amino acid sequence identity to a sequence selected from any one of: SEQ ID No.: 219 (origin: E. coli) or SEQ ID No.: 220 (origin: Pseudomonas putida); SEQ ID No.: 221 (origin: Deinococcus swuensis); SEQ ID No.: 222 (origin: Methanoculleus chikugoensis); SEQ ID No.: 223 (origin: Acidobacterium sp.); SEQ ID No.: 224 (origin: Corynebacterium glutamicum); SEQ ID No.: 225 (origin: Bacillus subtilis); SEQ ID No.: 226 (origin: Aquifex aeolicus); SEQ ID No.: 227 (origin: Synechocystis sp); and SEQ ID No.: 228 (origin: Petrotoga miotherma).

[0193] A GltD polypeptide comprising the glutamate synthase [NADPH] small chain of GOGAT, (EC: 1.4.1.13) has an amino acid sequence having at least 70, 75, 80, 85, 90, 95, 96, 98, 100% amino acid sequence identity to a sequence selected from any one of: SEQ ID No.: 230 (origin: E. coli); SEQ ID No.: 231 (origin: Pseudomonas putida). SEQ ID No.: 232 (origin: Deinococcus swuensis); SEQ ID No.: 233 (origin: Methanoculleus chikugoensis); SEQ ID No.: 234 (origin: Acidobacterium sp.); SEQ ID No.: 235 (origin: Corynebacterium glutamicum); SEQ ID No.: 236 (origin: Bacillus subtilis); SEQ ID No.: 237 (origin: Aquifex aeolicus); SEQ ID No.: 238 (origin: Synechocystis sp); and SEQ ID No.: 239 (origin: Petrotoga miotherma).

[0194] A cell factory relying on increased GltDB catalysis can also be used to produce considerable amount of ALA, which can be used as a molecule itself or as precursors for other molecules of interest. Accordingly, a genetically modified prokaryotic cell of the invention, comprising transgenes or upregulated endogenous genes encoding GltB and GltD, may additionally comprise transgenes or upregulated endogenous genes encoding GltX, HemA and HemL.

[0195] A GltX polypeptide having glutamyl-tRNA synthetase activity, (EC: 6.1.1.17) has an amino acid sequence having at least 70, 75, 80, 85, 90, 95, 96, 98, 100% amino acid sequence identity to a sequence selected from any one of: SEQ ID No.: 240 (origin: E. coli).

[0196] A HemA polypeptide having glutamyl-tRNA reductase activity, (EC: 1.2.1.70) has an amino acid sequence having at least 70, 75, 80, 85, 90, 95, 96, 98, 100% amino acid sequence identity to a sequence selected from any one of: SEQ ID No.: 107 (origin: E. coli).

[0197] A HemL polypeptide having Glutamate-1-semialdehyde 2,1-aminomutase activity, (EC: 5.4.3.8) has an amino acid sequence having at least 70, 75, 80, 85, 90, 95, 96, 98, 100% amino acid sequence identity to a sequence selected from any one of: SEQ ID No.: 108 (origin: E. coli).

[0198] When the genes encoding the GltB and GltD polypeptides and any additional polypeptides, optionally within an operon, are transgenes, they are located in the genome of the genetically modified prokaryotic cell, either integrated into the prokaryotic cell chromosome or on a self-replicating plasmid.

[0199] The promoter driving expression of each of the transgenes encoding GltB, GltD and any additional polypeptides is preferably a non-native promoter, which may be a heterologous constitutive-promoter or an inducible-promoter. When the promoter is a heterologous constitutive promoter, then a suitable promoter includes the apFab family [SEQ ID Nos.:97], while a suitable inducible promoter includes: pBad (arabinose inducible [SEQ ID No.:38] and Lacl [SEQ ID No.:40]. Suitable terminators include members of the apFAB terminator family including [SEQ ID No.: 98]. The selected promoter and terminator may be operably linked to the respective gene, either to provide individual gene regulation or for regulation of an operon.

### XIII A Method for Producing L-Glutamic Acid and 5-Aminolevulinic Acid Using a Genetically Modified Bacterium of the Invention

[0200] L-glutamic acid and δ-aminolevulinic acid can be produced using genetically modified prokaryotic cells of the invention (e.g. genetically modified E. coli cells) by introducing the cells into a suitable culture medium; and finally recovering the L-glutamic acid, as illustrated in the Example 8. A suitable culture medium includes a carbon source selected from among glucose, maltose, galactose, fructose, sucrose, arabinose, xylose, raffinose, mannose, and lactose.

[0201] A method for quantifying L-glutamic acid and δ-aminolevulinic acid produced by a genetically modified prokaryotic cell of the invention is described in example 8. The present invention provides a genetically modified prokaryotic cell capable of producing enhanced levels of L-glutamic acid.

### XIV A Genetically Modified Prokaryotic Cell for Production of Pyrroloquinoline Quinone (PQQ) and its Precursors and Quinoproteins

[0202] PQQ is synthesized in nature from a precursor which is small peptide PqqA, containing the sequence motif -E-X-X-X-Y-, where an L-glutamate and an L-tyrosine are separated by three amino acid residues. The enzyme PqqA peptide cyclase (PqqE) catalyzes PQQ synthesis by means of a radical driven C—C bond formation linking the glutamate and tyrosine residues at atoms C9 and C9a of PQQ. All carbon and nitrogen atoms of PQQ are derived from the tyrosine and glutamate residues of the PqqA peptide. The PqqE enzyme features a tunnel through the whole protein and a cave at one end, which harbors the active site with an iron-sulfur-cluster and bound SAM. PqqA is suggested to move through the tunnel to the iron-sulfur cluster where the Glutamate and Tyrosine side chains are then connected. PqqE is the first catalytic step in PQQ synthesis from its precursor PqqA, the subsequent steps requiring genes expressing PqqB, PqqC, PqqD, PqqF as well as a gene encoding the precursor.

[0203] According to a further embodiment, the present invention provides a genetically modified prokaryotic cell capable of producing enhanced levels of PQQ via the PQQ biosynthetic pathway (FIG. 20).

[0204] The prokaryotic cell is genetically modified to express a mutant IscR, according to the invention (see section I and II), in substitution for a wild type IscR, as well as comprising a transgene or up-regulated endogenous gene (i.e an endogenous gene operably linked to a genetically modified regulatory sequence capable of enhancing expression of said endogenous gene, as described in section I) encoding an PqqE polypeptide having PqqA peptide cyclase activity (EC: 1.21.98.4).

[0205] Genetically modified prokaryotic cells of the invention may further comprise one or more additional transgenes ot upregulated endogenous genes (as defined herein) encoding polypeptides catalyzing additional steps of the PQQ pathway, in particular encoding one or more of PqqA, PqqB, PqqC, PqqD, or PqqF such as to further enhance levels of both PQQ produced.

[0206] A PqqE polypeptide having PqqA peptide cyclase activity (EC: 1.21.98.4) is characterized by an amino acid sequence having at least 70, 75, 80, 85, 90, 95, 96, 98, 100% amino acid sequence identity to: SEQ ID No.: 242 (origin: Klebsiella pneumoniae); SEQ ID No.: 243 (origin: Planctomycetaceae bacterium); SEQ ID No.: 244 (origin: Chroococcidiopsis cubana); SEQ ID No.: 245 (origin: Azotobacter vinelandii); and SEQ ID No.: 246 (origin: Klebsiella pneumoniae).

[0207] A PqqA polypeptide contains the sequence motif -E-X-X-X-Y-, where an L-glutamate and an L-tyrosine are separated by three amino acid residues, and is characterized by an amino acid sequence having at least 70, 75, 80, 85, 90, 95, 96, 98, 100% amino acid sequence identity to: SEQ ID No.: 247 (origin: Klebsiella pneumoniae).

[0208] A PqqB polypeptide having a putative PQQ carrier function is characterized by an amino acid sequence having at least 70, 75, 80, 85, 90, 95, 96, 98, 100% amino acid sequence identity to: SEQ ID No.: 248 (origin: Klebsiella pneumoniae).

[0209] A PqqC polypeptide having Pyrroloquinoline-quinone synthase activity (EC: 1.3.3.11) is characterized by an amino acid sequence having at least 70, 75, 80, 85, 90, 95, 96, 98, 100% amino acid sequence identity to: SEQ ID No.: 249 (origin: Klebsiella pneumoniae).

[0210] A PqqD polypeptide having PqqA binding protein is characterized by an amino acid sequence having at least 70, 75, 80, 85, 90, 95, 96, 98, 100% amino acid sequence identity to: SEQ ID No.: 250 (origin: Klebsiella pneumoniae).

[0211] A PqqF polypeptide having metalloendopeptidase (EC: 3.4.24.-), involved in processing of the tyrosine and glutamate of PqqA at R1-R3, is characterized by an amino acid sequence having at least 70, 75, 80, 85, 90, 95, 96, 98, 100% amino acid sequence identity to: SEQ ID No.: 251 (origin: Klebsiella pneumoniae).

[0212] When the genes encoding PqqE, together with one or more additional PqqABCD and F polypeptides that play a role in the PQQ pathway and enhance its synthesis are transgenes, they are located in the genome of the genetically modified prokaryotic cell, either integrated into the prokaryotic cell chromosome or on a self-replicating plasmid. The transgene encoding PqqE and one or more of the transgenes encoding PqqABCD and F polypeptides may be present in the genome within one or more operon.

[0213] The promoter driving expression of the transgene encoding PqqE and one or more additional transgenes is preferably a non-native promoter, which may be a heterologous constitutive-promoter or an inducible-promoter. When expression driven by the promoter is constitutive, then a suitable promoter includes apFab family [SEQ ID Nos.:97] while a suitable inducible promoter includes: pBad (arabinose-inducible) [SEQ ID No.:38] and lac promoter lac p, which is regulated by repressor lacl [SEQ ID No.:40]. Suitable terminators include members of the apFAB terminator family including [SEQ ID No.: 98]. The selected promoter and terminator may be operably linked to the respective gene, either to provide individual gene regulation or for regulation of an operon.

### XV A Method for Producing Pyrroloquinoline Quinone (PQQ), its Precursors, and Quinoproteins Using a Genetically Modified Bacterium of the Invention

[0214] The pyrroloquinoline quinone (PQQ), its precursors, and quinoproteins can be produced using genetically modified prokaryotic cells of the invention (e.g. genetically modified E. coli cells) by introducing the cells into a suitable culture medium; and finally recovering the isoprenoid precursors or their derivatives, as illustrated in the Example 9. A suitable culture medium includes a carbon source selected from among glucose, maltose, galactose, fructose, sucrose, arabinose, xylose, raffinose, mannose, and lactose.

[0215] A method for quantifying IPP and DMAPP produced by a genetically modified prokaryotic cell of the invention is described in example 9.

The present invention provides a genetically modified prokaryotic cell capable of producing enhanced levels of PQQ as well as its precursors.

### XVI A Genetically Modified Prokaryotic Cell for Enhanced Nitrogenase Activity and Nitrogen Fixation

[0216] According to a further embodiment, the present invention provides a genetically modified prokaryotic cell capable of enhanced assembly of nitrogenase that converts atmospheric di-nitrogen (N₂) into ammonium that is then used in diverse metabolic pathway such as protein synthesis, as well in biological nitrogen fixation in diazotrophs. The assembly of the nitrogenase is dependent on the FeMo cofactor biosynthesis protein enzyme, NifB, which functions as a radical S-Adenosyl-Methionine (SAM) [4Fe-4S] enzyme (FIG. 21A). NifB plays a central role by catalyzing the assembly of the Fe—X Cofactor (X=V, Mo, Fe), and its transfer to nitrogenase, where it required for nitrogenase catalysis. The molybdenum-iron nitrogenase complex, on assembly comprises 4 proteins: NifH nitrogenase iron protein (EC: 1.18.6.1); NifD, nitrogenase protein alpha chain (EC: 1.18.6.1); NifK, nitrogenase molybdenum-iron protein beta chain (EC: 1.18.6.1) (FIG. 21B).

[0217] The prokaryotic cell is genetically modified to express a mutant IscR, according to the invention (see section I and II), in substitution for a wild type IscR, as well as comprising a transgene or up-regulated endogenous gene (i.e an endogenous gene operably linked to a genetically modified regulatory sequence capable of enhancing expression of said endogenous gene, as described in section I and II) encoding a NifB polypeptide having nitrogenase iron-molybdenum cofactor biosynthesis protein activity.

[0218] The growth of cells over-expressing NifB enzyme is dependent on an increased supply of [4Fe-4S] clusters provided in cells expressing the mutant IscR (Example 10, FIG. 22). Genetically modified prokaryotic cells of the invention that further comprise a nifB transgene or upregulated endogenous gene (as defined herein) alone, or in combination with one or more additional transgenes or upregulated endogenous gene (as defined herein) encoding polypeptides NifU (Nitrogen fixation protein) and NifS (cysteine desulfurase EC:2.8.1.7), as well as flavodoxin (fldA) are able to synthesize enhanced levels the nitrogenase complex. Optionally, the cells may comprise one of more transgenes or upregulated endogenous gene (as defined herein) encoding the polypeptides that form the nitrogenase complex, namely NifH, NifD, NifK, (FIG. 21B) as well and transgene encoding NifE, NifN, NifX, NifV HesA.

[0219] Polypeptides functioning as nifB, FeMo cofactor biosynthesis proteins are encoded by genes found in a wide range of microorganisms belonging to a wide range of genera. The amino acid sequence of the polypeptide having dihydroxy-acid dehydratase activity has at least 70, 75, 80, 85, 90, 95, 96, 98, 100% amino acid sequence identity to a sequence selected from any one of: SEQ ID No.: 253 (origin: Methanobacterium thermoautotrophicum); SEQ ID No.: 254 (origin: Paenibacillus polymyxa); SEQ ID No.: 255 (origin: Methanococcus infernus); SEQ ID No.: 256 (origin: Methanococcus acetivorans); SEQ ID No.: 257 (origin: Azotobacter vinelandii); SEQ ID No.: 258 (origin: Rhizobium leguminosarum) SEQ ID No.: 259 (origin: Thermocrinis albus); SEQ ID No.: 260 (origin: Frankia alni); SEQ ID No.: 261 (origin: Leptospirilum ferrodiazotrophum); and SEQ ID No.: 262 (origin: Cupriavidus taiwanensis).

[0220] The polypeptides that are encoded by the additional transgenes or upregulated endogenous gene (as defined herein) in the genetically modified prokaryotic cell, and whose activity serves to enhance the synthesis of both intermediates and products of the ilv pathway, are as follows:
[0221] a) a fldA polypeptide such as a flavodoxin characterized by an amino acid sequence having 80, 85, 90, 95 or 100% sequence identity to SEQ ID No.:65 (origin: E. coli);
[0222] b) a NifH polypeptide is a component of a complex having nitrogenase iron protein activity (EC: 2.18.6.1); such as a polypeptide characterized by an amino acid sequence having 80, 85, 90, 95 or 100% sequence identity to SEQ ID No.:263 (origin: Paenibacillus polymyxa);
[0223] c) a NifD polypeptide is a component of a complex having nitrogenase iron protein activity (EC: 1.18.6.1); such as a polypeptide characterized by an amino acid sequence having 80, 85, 90, 95 or 100% sequence identity to SEQ ID No.:264 (origin: Paenibacillus polymyxa);
[0224] d) e) a NifK polypeptide is a component of a complex having nitrogenase iron protein activity (EC: 1.18.6.1); such as a polypeptide characterized by an amino acid sequence having 80, 85, 90, 95 or 100% sequence identity to SEQ ID No.:265 (origin: Paenibacillus polymyxa);
[0225] e) a NifE polypeptide having Fe—Mo co-factor biosynthesis activity; such as a polypeptide characterized by an amino acid sequence having 80, 85, 90, 95 or 100% sequence identity to SEQ ID No.:266 (origin: Paenibacillus polymyxa);
[0226] f) a NifN polypeptide having nitrogenase iron-molybdenum cofactor biosynthesis protein activity; such as a polypeptide characterized by an amino acid sequence having 80, 85, 90, 95 or 100% sequence identity to SEQ ID No.:267 (origin: Paenibacillus polymyxa);
[0227] g) a NifX polypeptide having nitrogen fixation protein activity; such as a polypeptide characterized by an amino acid sequence having 80, 85, 90, 95 or 100% sequence identity to SEQ ID No.:268 (origin: Paenibacillus polymyxa);
[0228] h) a NifV polypeptide having homocysteine methyltransferase activity; such as a polypeptide characterized by an amino acid sequence having 80, 85, 90, 95 or 100% sequence identity to SEQ ID No.:269 (origin: Paenibacillus polymyxa);
[0229] i) a HesA polypeptide; such as a polypeptide characterized by an amino acid sequence having 80, 85, 90, 95 or 100% sequence identity to SEQ ID No.:270 (origin: Paenibacillus polymyxa);
   [0230] Genes encoding the NifB polypeptide, the radical S-Adenosyl-Methionine (SAM) [4Fe-4S] enzyme, together with one or more additional polypeptides that catalyze additional steps in the nif pathway (encoding NifU, NifS and optionally NifH, NifD, NifK, NifE, NifN, NifX, NifV HesA) as well as flavodoxin are transgenes, are located in the genome of the genetically modified prokaryotic cell, either integrated into the prokaryotic cell chromosome or on a self-replicating plasmid. The transgene encoding NifB and one or more of the transgenes encoding Nif pathway enzymes may be present in the genome within one or more operon.

[0231] The promoter driving expression of the transgene encoding NifB and one or more additional transgenes is preferably a non-native promoter, which may be a heterologous constitutive-promoter or an inducible-promoter. When the promoter is a heterologous constitutive promoter, then a suitable promoter includes the apFab family [SEQ ID Nos.:97], while a suitable inducible promoter includes: pBad (arabinose inducible [SEQ ID No.:38] and Lacl [SEQ ID No.:40]. Suitable terminators include members of the apFAB terminator family including [SEQ ID No.: 98]. The selected promoter and terminator may be operably linked to the respective gene, either to provide individual gene regulation or for regulation of an operon.

### XVII A Method for Enhancing Nitrogenase Assembly and Nitrogen Fixation Catalyzed by the NIF Pathway and Detecting Nitrogenase Activity in a Genetically Modified Bacterium According to the Invention

[0232] The assembly of the nitrogenase complex and nitrogen fixation in genetically modified prokaryotic cells of the invention (e.g. genetically modified E. coli cells) can be detected by introducing the cells into a suitable culture medium; and finally recovering the synthesized products, as illustrated in the Example 10. A suitable culture medium includes a carbon source selected from among glucose, maltose, galactose, fructose, sucrose, arabinose, xylose, raffinose, mannose, and lactose.

[0233] A method for the catalytic activity of the nitrogenase complex in a genetically modified prokaryotic cell of the invention is described in example 10.

[0234] The present invention provides a genetically modified prokaryotic cell capable of producing enhanced levels of the nitrogenase complex due to increased NifB mediated assembly, by measuring acetylene reduction.

### XVIII A Genetically Modified Prokaryotic Cell for Production of Indigo

[0235] According to a further embodiment, the present invention provides a genetically modified prokaryotic cell capable of indigo production via the indigo biosynthetic pathway (FIG. 23). The prokaryotic cell is genetically modified to express a mutant IscR, according to the invention (see section I and II), in substitution for a wild type IscR, as well as comprising transgenes or up-regulated endogenous genes (i.e an endogenous genes operably linked to a genetically modified regulatory sequence capable of enhancing expression of said endogenous genes, as described in section I and II) encoding a Rieske non-heme iron di-oxygenase complex (RDO). The RDO complex catalyzes the stereoselective insertion of two hydroxy groups into indole in one enzymatic step into cis-indole-2,3-dihydrodiol, which spontaneously oxidizes to indigo. In one embodiment the RDO comprises a dioxygenase (e.g. naphthalene dioxygenase (NDO) having naphthalene 1,2-dioxygenase activity (EC: 1.14.12.12), which itself is composed on 2 polypeptides (NdoB and NdoC); and a reductase having ferredoxin-NAD(P)+ reductase (naphthalene dioxygenase ferredoxin-specific) activity (EC: 1.18.1.7), also composed on 2 polypeptides (NdoA and NdoR).

[0236] A NdoB and NdoC polypeptides having naphthalene 1,2-dioxygenase activity (EC: 1.14.12.12), are characterized by an amino acid sequence having at least 70, 75, 80, 85, 90, 95, 96, 98, 100% amino acid sequence identity to: SEQ ID No.: 272 and 274 respectively (origin: Pseudomonas pudita). A NdoR and NdoA polypeptides having ferredoxin-NAD(P)+ reductase (naphthalene dioxygenase ferredoxin-specific) activity (EC: 1.18.1.7), are characterized by an amino acid sequence having at least 70, 75, 80, 85, 90, 95, 96, 98, 100% amino acid sequence identity to: SEQ ID No.: 276 and 278 respectively (origin: Pseudomonas pudita).

[0237] When the genes encoding the RDO (e.g. NdoBCAR) Ndo, that mediate the indigo biosynthetic pathway are transgenes, they are each individually located in the genome of the genetically modified prokaryotic cell, either integrated into the prokaryotic cell chromosome or on a self-replicating plasmid. The transgenes RDO (e.g. NdoBCAR) may be present in the genome within one or more operon.

[0238] The promoter driving expression of the transgenes encoding RDO (e.g. NdoBCAR) is preferably a non-native promoter, which may be a heterologous constitutive-promoter or an inducible-promoter. When expression driven by the promoter is constitutive, then a suitable promoter includes apFab family [SEQ ID Nos.:97] while a suitable inducible promoter includes: pBad (arabinose-inducible) [SEQ ID No.:38] and lac promoter lac p, which is regulated by repressor lacl [SEQ ID No.:40]. Suitable terminators include members of the apFAB terminator family including [SEQ ID No.: 98]. The selected promoter and terminator may be operably linked to the respective gene, either to provide individual gene regulation or for regulation of an operon.

### XIX A Method for Enhancing Indigo Production by a Genetically Modified Bacterium of the Invention

[0239] The indigo can be produced using genetically modified prokaryotic cells of the invention (e.g. genetically modified E. coli cells) by introducing the cells into a suitable culture medium; and finally recovering the isoprenoid precursors or their derivatives, as illustrated in the Example 9. A suitable culture medium includes a carbon source selected from among glucose, maltose, galactose, fructose, sucrose, arabinose, xylose, raffinose, mannose, and lactose.

[0240] A method for quantifying IPP and DMAPP produced by a genetically modified prokaryotic cell of the invention is described in example 9.

[0241] The present invention provides a genetically modified prokaryotic cell capable of producing enhanced levels of PQQ as well as its precursors.

### XX SAM or AdoMet Radical Fe—S Enzyme Activity in Genetically Modified Prokaryotic Cells of the Invention is Enhanced by Increased Electron Transfer.

[0242] Fe_S cluster enzymes containing an oxidized [4Fe-4S]²⁺ cluster, e.g oxygen-independent coproporphyrinogen III oxidase synthase (EC: 1.3.98.3); NifH nitrogenase iron protein (EC: 1.18.6.1); IspG polypeptides having 4-hydroxy-3-methylbut-2-en-1-yl diphosphate synthase (EC: 1.17.7.3); HemN and IspH polypeptides having 4-hydroxy-3-methylbut-2-enyl diphosphate reductase activity (EC: 1.17.7.4), need electron transfer for reduction to a [4Fe-4S]⁺ cluster. Only the reduced [4Fe-4S]⁺ cluster is able generate the SAM-radical needed for catalysis. The electron transfer from the electron donor NADPH to the [4Fe-4S]²⁺ cluster can be mediated by a flavodoxin/ferredoxin reductase (Fpr) and flavodoxin (FldA) reduction system or by a Pyruvate-flavodoxin/ferredoxin oxidoreductase system.

[0243] In a further embodiment, the genetically modified prokaryotic cell according to the present invention, further comprises one or more genes selected from the group: a gene encoding a flavodoxin/ferredoxin-NADP reductase (EC: 1.18.1.2 and EC 1.19.1.1); a gene encoding a pyruvate-flavodoxin/ferredoxin oxidoreductase (EC: 1.2.7); a gene encoding a flavodoxin; a gene encoding a ferredoxin; a gene encoding a flavodoxin and a ferredoxin-NADP reductase. Promoter(s) or RBS sequences, operably-linked to each of said one or more genes are capable of enhancing expression of said one or more genes in said cell; wherein each said one or more genes may be a endogenous native gene or a transgene. Preferably, the operably-linked promoter or RBS, enhances expression of said one or more genes in said cell to a level greater than in the parent cell from which the genetically-modified bacterium of the invention was derived. Preferably, the genetically modified prokaryotic cell according to the present invention comprises a gene encoding a flavodoxin/ferredoxin-NADP reductase (EC: 1.18.1.2 and EC 1.19.1.1) and a gene encoding a flavodoxin; or a single gene comprising coding sequences for both a flavodoxin and a ferredoxin-NADP reductase. Additionally said genetically modified prokaryotic cell may further comprise a gene encoding a ferredoxin.

[0244] Overexpression of genes expressing components of the electron transfer pathway in genetically modified prokaryotic cells of the present invention, enhances the cellular activity of their SAM-radical iron-sulfur cluster enzymes (as illustrated in Example 2 for biotin-producing cells of the invention). Preferably, when the polypeptide encoded by a native gene or transgene in the genetically modified prokaryotic cell of the invention has flavodoxin/ferredoxin reductase activity (EC: 1.18.1.2 and EC 1.19.1.1), it has an amino acid sequence having 80, 85, 90, 95 or 100% sequence identity to a sequence selected from any one of: SEQ ID No.: 43 (origin: fpr gene from E. coli); SEQ ID No.:45 (origin: yum C gene from Bacillus subtilis 168); SEQ ID No.:47 (origin: fpr-I gene from Pseudomonas putida KT2440); SEQ ID No.:48 (origin: SVEN_0113 gene from Streptomyces venezuelae ATCC 10712-); SEQ ID No.:51 (origin: Cgl2384 gene from Corynebacterium glutamicum ATTCC 13032), and SEQ ID No.:53 (origin: SJN15614.1 gene from Sphingobacterium sp. JB170.

[0245] Preferably, when the polypeptide encoded by an endogenous native gene or transgene in the genetically modified prokaryotic cell of the invention has pyruvate-flavodoxin/ferredoxin oxidoreductase activity (EC: 1.2.7), it has an amino acid sequence having 80, 85, 90, 95 or 100% sequence identity to a sequence selected from any one of: SEQ ID No.: 55 (origin: YdbK gene from E. coli K12 MG1655); SEQ ID No.: 57 (origin: por gene from Geobacter sulfurreducens AM-1); SEQ ID No.: 59 (origin: Sfla_2592 gene from Streptomyces pratensis ATCC 33331; SEQ ID No.: 61 (origin: RM25_0186 gene from Propionibacterium freudenreichii DSM 20271); SEQ ID No.: 63 (origin: nifJ gene from Synechocystis sp. PCC 6803)

[0246] Preferably, when the polypeptide encoded by a endogenous native gene or transgene in the genetically modified prokaryotic cell of the invention Is a flavodoxin, it has an amino acid sequence having 80, 85, 90, 95 or 100% sequence Identity to a sequence selected from any one of: SEQ ID No.: 65 (origin: fldA gene from Escherichia coli K12 MG1655); SEQ ID No.: 67 (origin: fldB gene from Escherichia coli K12 MG1655); SEQ ID No.: 69 (origin: ykuN gene from Bacillus subtilis 168); SEQ ID No.: 71 (origin: isiB gene from Synechocystis sp. PCC 6803; SEQ ID No.: 73 (origin: wrbA gene from Streptomyces venezuelae ATCC 10712); SEQ ID No.: 75 (origin: PRK06242 gene from Methanococcus aeolicus Nankai-3).

[0247] Preferably, when the polypeptide encoded by a endogenous native gene or transgene in the genetically modified prokaryotic cell of the invention is a ferredoxin, it has an amino acid sequence having 80, 85, 90, 95 or 100% sequence identity to a sequence selected from any one of: SEQ ID No.: 77 (origin: fdx gene from E. coli); SEQ ID No.: 79 (origin: fer gene from Bacillus subtilis 168); SEQ ID No.: 81 (origin: fdxB gene from Corynebacterium glutamicum ATTCC 13032); SEQ ID No.: 83 (origin: fdx gene from Synechocystis sp. PCC 6803); SEQ ID No.: 85 (origin: SVEN_7039 gene from Streptomyces venezuelae ATCC 10712); SEQ ID No.: 87 (origin: fdx gene from Methanococcus aeolicus Nankai-3).

[0248] When a promoter is employed to enhance gene expression of an operably-linked endogenous native gene or to a transgene encoding a polypeptide of the electron transport pathway in said cell, it is preferably a non-native promoter. Said promoter may be a member of the constitutive apFAB309 promoter family [SEQ ID Nos.:93]. Preferably said non-native promoter, when operably-linked to said native gene or transgene enhances expression of said encoded polypeptide(s) in said genetically modified bacterium to a level greater than the parent bacterium from which it was derived. Suitable terminators that may be operably-linked to said endogenous native gene or transgene includes the apFAB terminator family [SEQ ID No.: 98].

### XXI Methods for Engineering a Genetically Modified Prokaryotic Cell

[0249] Prokaryotic cells are genetically engineered by the introduction into the cells of transgenes or by the upregulation of expression of endogenous genes as illustrated in the Examples.
Genetic modification of endogenous genes in a prokaryotic cell of the invention can be performed by deletion (knockout) of the endogenous gene and insertion/substitution with a transgene encoding a mutant polypeptide as defined in section I and II, by applying standard recombineering methods to a suitable parent prokaryotic cell (Datsenko K A, et al.; 2000). Genetic modification of an endogenous gene sequence and/or regulatory sequence that are operatively linked to said endogenous gene can be performed by using a range of techniques known in the art, including recombineering (e.g. MAGE with single-strand DNA) and CRISPR-Cas gene editing.
The genetically modified prokaryotic cell according to the invention, may be a bacterium, a non-exhaustive list of suitable bacteria is given as follows: a species belonging to the genus selected from the group consisting of: Escherichia, Brevibacterium, Burkholderia, Campylobacter, Corynebacterium, Pseudomonas, Serratia, Lactobacillus, Lactococcus, Acetobacter, Acinetobacter, Pseudomonas, etc.
Preferred bacterial species of the invention are Escherichia coli, Pseudomonas putida, Serratia marcescens and Corynebacterium glutamicum.
In the case of nitrogen fixation, a preferred genetically modified bacterial species of the invention belongs to the genus Rhizobium, associated with leguminous plants (e.g., various members of the pea family); Frankia, associated with certain dicotyledonous species (actinorhizal plants); and Azospirillum, associated with cereal grasses.

### VIII SAM or AdoMet Radical Fe—S Enzyme Activity in Genetically Modified Prokaryotic Cells of the Invention is Enhanced by Increased Electron Transfer.

[0250] Fe_S cluster enzymes containing an oxidized [4Fe-4S]²⁺ duster, e.g oxygen-independent coproporphyrinogen III oxidase synthase (EC: 1.3.98.3); NifH nitrogenase iron protein (EC: 1.18.6.1); IspG polypeptides having 4-hydroxy-3-methylbut-2-en-1-yl diphosphate synthase (EC: 1.17.7.3); HemN and IspH polypeptides having 4-hydroxy-3-methylbut-2-enyl diphosphate reductase activity (EC: 1.17.7.4), need electron transfer for reduction to a [4Fe-4S]⁺ cluster. Only the reduced [4Fe-4S]⁺ cluster is able generate the SAM-radical needed for catalysis. The electron transfer from the electron donor NADPH to the [4Fe-4S]²⁺ cluster can be mediated by a flavodoxin/ferredoxin reductase (Fpr) and flavodoxin (FldA) reduction system or by a Pyruvate-flavodoxin/ferredoxin oxidoreductase system.
In a further embodiment, the genetically modified prokaryotic cell according to the present invention, further comprises one or more genes selected from the group: a gene encoding a flavodoxin/ferredoxin-NADP reductase (EC: 1.18.1.2 and EC 1.19.1.1); a gene encoding a pyruvate-flavodoxin/ferredoxin oxidoreductase (EC: 1.2.7); a gene encoding a flavodoxin; a gene encoding a ferredoxin; a gene encoding a flavodoxin and a ferredoxin-NADP reductase. Promoter(s) or RBS sequences, operably-linked to each of said one or more genes are capable of enhancing expression of said one or more genes in said cell; wherein each said one or more genes may be a endogenous native gene or a transgene. Preferably, the operably-linked promoter or RBS, enhances expression of said one or more genes in said cell to a level greater than in the parent cell from which the genetically-modified bacterium of the invention was derived. Preferably, the genetically modified prokaryotic cell according to the present invention comprises a gene encoding a flavodoxin/ferredoxin-NADP reductase (EC: 1.18.1.2 and EC 1.19.1.1) and a gene encoding a flavodoxin; or a single gene comprising coding sequences for both a flavodoxin and a ferredoxin-NADP reductase. Additionally said genetically modified prokaryotic cell may further comprise a gene encoding a ferredoxin.
Overexpression of genes expressing components of the electron transfer pathway in genetically modified prokaryotic cells of the present invention, enhances the cellular activity of their SAM-radical iron-sulfur cluster enzymes (as illustrated in Example 2 for biotin-producing cells of the invention).
Preferably, when the polypeptide encoded by a native gene or transgene in the genetically modified prokaryotic cell of the invention has flavodoxin/ferredoxin reductase activity (EC: 1.18.1.2 and EC 1.19.1.1), it has an amino acid sequence having 80, 85, 90, 95 or 100% sequence identity to a sequence selected from any one of: SEQ ID No.: 241 (origin: fpr gene from E. coli); SEQ ID No.:243 (origin: yumC gene from Bacillus subtilis 168); SEQ ID No.:245 (origin: fpr-I gene from Pseudomonas putida KT2440); SEQ ID No.:247 (origin: SVEN_0113 gene from Streptomyces venezuelae ATCC 10712-); SEQ ID No.:249 (origin: Cgl2384 gene from Corynebacterium glutamicum ATTCC 13032), and SEQ ID No.:251 (origin: SJN15614.1 gene from Sphingobacterium sp. JB170.
Preferably, when the polypeptide encoded by an endogenous native gene or transgene in the genetically modified prokaryotic cell of the invention has pyruvate-flavodoxin/ferredoxin oxidoreductase activity (EC: 1.2.7), it has an amino acid sequence having 80, 85, 90, 95 or 100% sequence identity to a sequence selected from any one of: SEQ ID No.: 253 (origin: YdbK gene from E. coli K12 MG1655); SEQ ID No.: 255 (origin: par gene from Geobacter sulfurreducens AM-1); SEQ ID No.: 257 (origin: Sfla_2592 gene from Streptomyces pratensis ATCC 33331; SEQ ID No.: 259 (origin: RM25_0186 gene from Propionibacterium freudenreichii DSM 20271); SEQ ID No.: 261 (origin: nifJ gene from Synechocystis sp. PCC 6803)
Preferably, when the polypeptide encoded by a endogenous native gene or transgene in the genetically modified prokaryotic cell of the invention is a flavodoxin, it has an amino acid sequence having 80, 85, 90, 95 or 100% sequence identity to a sequence selected from any one of: SEQ ID No.: 263 (origin: fldA gene from Escherichia coli K12 MG1655); SEQ ID No.: 265 (origin: fldB gene from Escherichia coli K12 MG1655); SEQ ID No.: 267 (origin: ykuN gene from Bacillus subtilis 168); SEQ ID No.: 269 (origin: IsiB gene from Synechocystis sp. PCC 6803; SEQ ID No.: 271 (origin: wrbA gene from Streptomyces venezuelae ATCC 10712); SEQ ID No.: 273 (origin: PRK06242 gene from Methanococcus aeolicus Nankai-3).
Preferably, when the polypeptide encoded by a endogenous native gene or transgene in the genetically modified prokaryotic cell of the Invention is a ferredoxin, it has an amino add sequence having 80, 85, 90, 95 or 100% sequence identity to a sequence selected from any one of: SEQ ID No.: 275 (origin: fdx gene from E. coli); SEQ ID No.: 277 (origin: fer gene from Bacillus subtilis 168); SEQ ID No.: 279 (origin: fdxB gene from Corynebacterium glutamicum ATTCC 13032); SEQ ID No.: 281 (origin: fdx gene from Synechocystis sp. PCC 6803); SEQ ID No.: 283 (origin: SVEN_7039 gene from Streptomyces venezuelae ATCC 10712); SEQ ID No.: 285 (origin: fdx gene from Methanococcus aeolicus Nankai-3).
When a promoter is employed to enhance gene expression of an operably-linked endogenous native gene or to a transgene encoding a polypeptide of the electron transport pathway in said cell, it is preferably a non-native promoter. Said promoter may be a member of the constitutive apFAB309 promoter family [SEQ ID Nos.:93]. Preferably said non-native promoter, when operably-linked to said native gene or transgene enhances expression of said encoded polypeptide(s) in said genetically modified bacterium to a level greater than the parent bacterium from which it was derived. Suitable terminators that may be operably-linked to said endogenous native gene or transgene includes the apFAB378 terminator family [SEQ ID No.: 41].

### EXAMPLES

### Example 1: Identification and Characterization of Genetically Modified E. coli Strains Capable of Enhanced Biotin Production

[0251] 1.01: The Following Strains of Escherichia coli Used in the Examples are Listed Below.

TABLE 1
Strains

| Name | Description |
|---|---|
| BS1013 | E. coli K-12 BW25113 parent strain having genotype: |
| | rrnB3 ΔlacZ4787 hsdR514 Δ(araBAD)567 Δ(rhaBAD)568 rph-1 |
| BS1011 | ΔbioB ¹(JW0758-1) derived from E. coli K-12 BW25113 |
| BS1353 | BS1011 derivative comprising a H107Y mutation in iscR |
| BS1113 | BS1011 derivative comprising pBS412 plasmid giving IPTG - inducible |
| | BioB expression |
| BS1375 | BS1011 derivative comprising a C92Y mutation in iscR |
| BS1377 | BS1011 derivative comprising a L15F mutation in iscR |

¹Nucleotide sequence of ΔbioB gene prior to deletion was SEQ ID No. 33

### 1.02: The Following Plasmids Used in the Examples are Listed Below.

TABLE 2
Plasmids

| Name | Description |
|---|---|
| pBS412 | BioB [SEQ ID No: 34] overexpression plasmid (kanR, SC101) from a T5 lacO |
| | repressed promoter [SEQ ID No.: 37] |
| pBS430 | pBS412 with frame shift mutation early in bioB ¹(kanR, SC101) [SEQ ID |
| | No.: 36] from a T5 lacO repressed promoter [SEQ ID No.: 37] |
| pBS451 | Constitutively expressed GFP [SEQ ID No.: 89] (zeoR, p15A) |
| pBS281 | E. coli isc operon (iscSUA-hscBA-fdx) from an IPTG inducible T5 promoter |
| | cloned in a medium copy number plasmid (p15A ori) |
| pBS282 | E. coli suf operon (sufABCDSE) from an IPTG inducible T5 promoter cloned |
| | in a medium copy number plasmid (p15A ori) |
| pBS231 | A medium copy number plasmid (p15A ori) expressing a gene encoding a |
| | sfGFP protein from an IPTG inducible T5 promoter |
| pBS936 | Native biotin-operon from E. coli with “type 9” mutation in bio operator |
| | site (Ifuku et al., 1993) |

¹Nucleotide sequence of bioB frameshift gene has SEQ ID No. 35

### 1.03 Media and Additives:

[0253] The growth media (mMOPS) used in each example had the following composition: 1.32 mM K2HPO4; 2 g/L D-glucose; 0.0476 mg/I calcium pantothenate; 0.0138 mg/L p-aminobenzoic acid; 0.0138 mg/L p-hydroxybenzoic acid; 0.0154 mg/L 2,3-dihydroxybenzoic acid, and 1× modified MOPS buffer. 10× modified MOPS comprises 0.4 M MOPS (3-(N-morpholino) propane sulfonic acid); 0.04 M Tricine; 0.1 mM FeSO₄•7H₂O; 95 mM NH₄Cl; 2.76 mM K₂SO₄; 5 μM CaCl₂•2H₂O; 5.25 mM MgCl₂; 0.5 M NaCl; and 5000× dilution of micronutrient stock solution.

TABLE 3
Micronutrient stock solution:

| | | | Grams |
|---|---|---|---|
| Component | Formula | FW | per 50 mL |
| ammonium molybdate | (NH₄)₆Mo₇O₂₄•4H₂O | 1235.9 | 0.009 |
| boric acid | H₃BO₃ | 61.83 | 0.062 |
| cobalt chloride | CoCl₂ | 237.9 | 0.018 |
| cupric sulfate | CuSO₄ | 249.7 | 0.006 |
| manganese chloride | MnCl₂ | 197.9 | 0.040 |
| zinc sulfate | ZnSO₄ | 287.5 | 0.007 |

The following antibiotic stocks were employed: ampicillin (amp, 100 mg/mL), kanamycin (kan, 50 mg/mL), zeocin (zeo, 40 mg/mL); that were added to growth media as indicated to obtain a 1000× dilution.
1.04 Establishing of E. coli Strain Libraries:
E. coli libraries having evolved genomic diversity were derived from cells of E. coli strain BS1011 comprising plasmid pBS412 by subjecting the cells to stationary overnight culture in mMOPS medium supplemented with kan (MOPS-kan), preparing a 100× dilution of resulting culture in mMOPS-kan and repeating the consecutive steps of overnight culture and dilution 5 times. This procedure creates genetic diversity by allowing the accumulation of background mutation generated by imperfect error-correcting polymerases. After each round of culture and dilution a sample of the cell culture was plated on mMOPS plates with IPTG (see below), to detect the evolution of cells adapted to tolerate enhanced BioB expression. Cells of each library were then transformed with the BioB over-expression plasmid, pBS412.

### 1.05 Selection of Mutant Strains

[0254] A selection assay was developed by plating respectively 10⁴, 10⁵, 10⁶ and 10⁷ cells, derived from an o/n culture in mMOPS-kan of BS1011 comprising pBS412, on a series of 1.5% agar plates comprising mMOPS (Ø=9 cm) comprising IPTG concentrations of either 0, 0.0001, 0.001, 0.01, 0.1 and 1 mM. The plates were then incubated at 37° C. for up to 36 hours and cell growth was evaluated at intervals. Under these conditions, induction of BioB expression from pBS412 with 0.1 mM IPTG was found to prevent growth of up to 10⁵ cells, while induction with 1 mM IPTG prevented growth of at least 10′ cells, when plated on a single petri dish. A selection pressure comprising induction with 1 mM IPTG for a cell population of 10⁵ cells was found optimal for identifying strains with higher robustness towards BioB expression; and accordingly was implemented as follows:
[0255] 1. Approximately 10⁵ cells from each library, as described in section 1.4, were plated on each mMOPS-kan −1 mM IPTG agar plate and incubated at 37° C. for maximum 24 hours.
[0256] 2. Single colonies were grown in mMOPS-kan liquid medium to produce pre-cultures, that were then evaluated for their biotin production by means of a biotin bioassay (as described in section 1.6 below) that was performed in mMOPS-kan supplemented with either 0.00, 0.01 or 0.1 mM IPTG. Cells of each pre-culture were preserved as glycerol stocks in 20% glycerol.
[0257] 3. Colonies producing more than 1.5 mg biotin/L (detected as extracellular biotin) were re-streaked on mMOPS-kan agar plates, incubated at 37° C. for up to 24 hours, and then re-bioassayed for biotin production in biological replicates (as detailed in section 1.6 below).
[0258] 4. Cells of the selected biotin over-producing strains were evaluated as follows:
[0259] a) Whole genome sequencing to identify genetic mutations in the genome of cells of selected strains as compared to the genome of the parent strain BS1011 was performed on DNA isolated from cells of the selected strain as follows: Selected cells were grown in 5-10 mL mMOPS-kan and the cells were subsequently harvested; genomic DNA was isolated from the harvested cells using Invitrogen Purelink genomic DNA extraction kit: (https://www.thermofisher.com/order/catalog/product/K182001); the extracted DNA was subjected to whole genome sequencing.
[0260] b) Curing cells of the selected strains of their pBS412 plasmid; then re-transforming the cells of the cured strain with the pBS412 plasmid; and finally redoing bioassay of cultures of cells of the transformed strains for biotin production. The steps of curing cells of their pBS412 plasmid were performed by growing the cells in rich, Luria Broth (LB) media with 1 mM IPTG without antibiotics overnight at 37° C.; streaking out cells of the resulting culture on LB agar plates and incubating overnight at 37° C. Single colonies from the agar plates were diluted in 50 μl LB media and 5 μl were used to spot on LB and LB-amp agar plates, which were incubated overnight at 37° C. Those single colonies that grew on LB plates, but not on LB-amp plates, were re-streaked on LB plates to obtain single colonies, which were used as cured strain for re-transformation.
[0261] c) Biotin production by cells of the transformed strains where measured in biological replicates (as detailed in section 1.6 below). Briefly, biotin production re-evaluated for biological replicates in mMOPS-kan supplemented with 0.00, 0.01 or 0.1 mM IPTG. In parallel, the growth rates of the cells of each transformed strain were measured in 200 μL mMOPS-kan medium in a microtiter plate sealed with transparent breathable seal at 37° C. with “fast shaking” for aerobic growth, for a period of 24 hours in a Multiskan FC. Cell growth was monitored by measuring OD₆₂₀ₙₘ every 30 minutes.

### 1.06 Bioassay for Quantifying Biotin Production

[0262] Pre-cultures were each prepared from a selected single cell colony in 400 μL mMOPS-kan in a 96 deep-well plate, incubated at 37° C. with shake at 275 rpm for 16-18 hours. Production cultures were produced by inoculating 400 μL mMOPS-kan, supplemented with 0.1 g/L desthiobiotin (DTB), and optionally comprising IPTG at a final concentration of up to 1 mM, in a 96 deep-well plate, with 4 μL of the pre-culture enough to provide an initial OD600 of ^{˜}0.03. Cultures were then grown at 37° C. with 275 rpm shake for 24 hours. Cells in the 96 deep-well plate were pelleted by centrifuging at 4000 G for 8 minutes after measuring OD₆₀₀ of the cultures. The supernatant from each culture supernatant was diluted to a concentration range of 0.05 nM to 0.50 nM biotin in ultrapure (Milli-Q) water. In parallel, >5 biotin standards in the concentration range of 0.1 nM (0.024 μg biotin/L) to 1 nM (0.24 μg biotin/L), were prepared in Milli-Q water. 15 μL of each diluted supernatant and each of the biotin standards was then added to a well of a microtiter plate; wherein each well comprised 135 μL of a biotin-starved overnight culture of BS1011 comprising plasmid pBS451; and where the overnight culture was diluted to an initial OD₆₂₀ of 0.01 in mMOPS supplemented with zeocin. The plate was sealed with a breathable seal and incubated at 37° C. with 275 rpm shaking for 20 hours before OD₆₂₀ₙₘ was measured. A biotin bioassay calibration curve obtained with this bioassay, using a range of biotin standards, is shown in FIG. 5.

### 1.07 Identification of Genomic Mutations

[0263] For all Next-Generation Sequencing (NGS) data, CLC genomic workbench version 9.5.3 (supplied by Qiagen) was used to identify mutations in the genome of cells of selected strains as compared to the parent strain genome (single or a few substitutions, deletions or insertions by Variant Detection and bigger insertions/deletions by InDels and Structural Variants). A cut-off of 85% were used to define “significant mutations” meaning that a mutation should be present in more than 85% of the population of DNA molecules (genomes) isolated from cells of a given bacterial strain, in order to distinguish genome mutations from erroneous nucleotides introduced by the sequencing procedure.
The genome accession number CP009273 from NCBI was used as the reference sequence, while taking account of the Keio ΔbioB scar mutation whose sequence was confirmed by sequencing.
1.08 Characterizing Proteomics Landscape of iscR Mutant
Protein content of BS1013+pBS430, 851011+pBS412 and BS1353+pBS412 at 0.025 mM IPTG induction levels as well as BS1353+pBS412 at 1 mM IPTG induction were determined by a recently developed approach combining LC-MS and efficient protein extraction (Schmidt et al, 2015). 3 peptides were chosen as minimum number of identified peptides for analysis along with a peptide threshold of 2.0% FDR. Significant changes in protein expression are reported with a 0.5% confidence interval based on Analysis of Variance (ANOVA) with Benjamini-Hochberg correction for multiple testing using a Scaffold Viewer 4.7.5.
Strains were grown in mMOPS with IPTG induction for approximately 10 generations, until OD₆₀₀ of 0.5 were reached (exponential phase). 10⁸ cells were harvested by centrifugation at 4° C. at maximum speed; washed once in ice-cold PBS buffer; re-pelleted by centrifugation at 4° C. at maximum speed and snap-frozen in liquid nitrogen, after removing PBS buffer.

### 1.09 Overexpression of BioB is Toxic

[0264] E. coli retaining its native biotin synthase gene (bioB) but expressing an IPTG-inducible frameshifted E. coli bioB gene (encoding non-functional biotin synthase due to a premature stop codon) from a low-copy plasmid (Sc101 origin of replication) is able to grow aerobically in mMOPS-kan medium with or without IPTG. This is illustrated in FIG. 4 (left panel), showing the exponential growth curve of the E. coli BW25113, BioB frameshift mutant. In contrast, over-expression of a functional biotin synthase gene (bioB) in the E. coli knock-out strain ΔbioB, is toxic for growth, causing a very significant extension in the lag phase. This is illustrated in FIG. 4 (right panel), that shows the growth of E. coli knock-out strain ΔbioB expressing an E. coli bioB gene from an IPTG-inducible T5 promoter on a low-copy plasmid (Sc101 origin of replication). As seen in FIG. 4, induction of increasing bioB expression in response to increasing IPTG levels (darkness of grey) significantly affects the lag-phase while the growth rate is affected slightly (black boxes).
1.10 Isolation of iscR Mutant Strains Having Enhanced Biotin Production Titers
E. coli libraries having evolved genomic diversity (see sections 1.4 and 1.5) were screened for strains with improved tolerance for bioB gene expression and increased biotin production. Whole genome sequencing of the selected strains led to the identification of three unique mutants each comprising an Iron-sulfur cluster regulator (iscR) gene encoding an iscR polypeptide having one of the amino acid substitutions: L15F, C92Y and H107Y, and where the amino acid sequence of the encoded regulators is SEQ ID No.: 16, 18 and 20 respectively. Biotin production levels were measured using a bioassay, as described in section 1.6 (and FIG. 5). The biotin production titers for each of the iscR mutant strains as well as the E. coli BW25113 ΔbioB reference strain are shown in FIG. 6 for 4 biological replicates (black dots) grown in mMOPS supplemented with 0.1 g/L DTB in the absence or presence of two different IPTG concentration levels (increasing IPTG with darker grey). Biotin production in the reference strain was inhibited at IPTG levels of above 0.01 mM, which corresponds to IPTG levels that are toxic for growth of the reference strain (see FIG. 4), while the iscR mutant strains both grew and produced biotin at IPTG levels of 0.01-0.1 mM IPTG. All three iscR mutant strains produce approximately 1.5-fold more biotin than the reference strain (stippled line) at an IPTG concentration of 0.01 mM. The iscR mutant strains produce up to 2-fold more (^{˜}3.2 mg biotin/L) at an IPTG concentration of 0.1 mM, than the highest production titer from the reference strain (^{˜}1.5 mg biotin/L).

### 1.11 Biotin Production and Growth in an IscR H107Y Mutant Strain

[0265] The growth profile and biotin production titer of the iscR (H107Y) mutant strain was characterized in 50 mL mMOPS supplemented with 0.1 g/L DTB in a 250 mL shake-flask experiment at two different IPTG induction levels (0.01 mM in FIG. 7A) and 0.5 mM (FIG. 7B). At low IPTG levels (FIG. 7A), the IscR mutant strain (dark grey) and the reference strain (light grey) were similar with respect to growth and biotin production titers, with a final titer of ^{˜}1.1 mg biotin/L. However, at high IPTG induction levels (0.5 mM in FIG. 7B) growth of the reference strain (light grey) was severely inhibited, while the IscR mutant strain retained the same growth profile as at low IPTG induction levels. Furthermore, the biotin production titers of the IscR mutant strain increased around 2-fold, up to ^{˜}2.2 mg biotin/L after 25 hours of growth.

### 1.12 Mechanism of Action of IscR Mutations

[0266] An enhanced biotin tolerance phenotype was clearly demonstrated for all three of the identified IscR mutant strains, as seen in FIG. 6. The ability of the C92 mutation (C92Y) to enhance biotin tolerance is suggested to be due to a role for C92 in the [Fe—S] cluster binding properties of IscR. Loss of [Fe—S] cluster binding properties due to the C92Y mutation is proposed to inactivate the Isc-operon repression behavior of IscR. At the same time, it is proposed that the promoter function of IscR remains intact in the C92Y mutant IscR, such that it retains its function in activating other pathways essential for multiple cellular processes. A similar essential role in providing the [Fe—S] cluster binding properties of IscR is attributed to H107; where the H107Y mutation is similarly able to enhance biotin tolerance in E. coli. The L15F in IscR is also proposed to disrupt iron-sulfur cluster binding and thereby partially overcome iron-sulfur cluster depletion. FIG. 9 shows the position of the L15 and H107 in IscR when bound to DNA (binding site of hya, PDB entry 4HF1), and residue L15 is positioned at the inside of each of the IscR subunits. Phenylalanine is a significantly larger amino acid than leucine, and it may interfere with the three-dimensional folding of the protein.
1.13 Overexpression of the Isc-Operon or Suf Operon in E. coli Strains Alone is not Sufficient to Enhance Biotin Production
In order to determine the direct effect of overexpressing the isc-operon (iscSUA-hscBA-fdx, corresponding to the native E. coli operon structure minus the iscR gene) or the suf-operon (sufABCDSE corresponding to the native E. coli operon structure) on biotin production in E. coli, each operon was cloned into a medium copy number plasmid (p15A ori) placed under the control of a strong RBS and an IPTG inducible T5 promoter. A plasmid, comprising a gene encoding a super folder Green Fluorescent Protein (sfGFP) in substitution for the isc- or suf-operon, was employed as a control. The respective plasmids were transformed into cells of an E. coli strain comprising an IPTG-inducible bioB expression plasmid. Biological triplicate colonies comprising one of: 1) IPTG-inducible isc-operon, 2) IPTG-inducible suf-operon or 3) IPTG-inducible GFP (control) in addition to the IPTG-inducible bioB expression plasmid were assayed for biotin production (as described in section 1.5) following cultivation in 400 μL mMOPS with 100 μg/mL ampicillin and 50 μg/mL spectinomycin under low (0.01 mM IPTG) and high (0.1 mM IPTG) induction.
Although biotin production was IPTG-inducible in all strains (FIG. 10); the IPTG concentration needed to reach detectable biotin production levels was increased from 0.01 mM IPTG to 0.1 mM IPTG, when compared to the reference and mutant iscR strains shown in FIG. 6. Furthermore, biotin production titers were significantly decreased by the overexpression of isc- or suf-operons, when compared to both the sfGFP strain in FIG. 10. Additionally, overexpression of isc-operon depressed biotin production even more than overexpression of suf-operon. Taken together with the observed increase in biotin production seen in mutant strains having a single point mutation in iscR (FIG. 6), it is unlikely that the resulting de-repression of isc-operon in these strains is the only/main reason for improved biotin production in those strains.
1.14 BioB Protein Contents Correlates with Biotin Production
To investigate the molecular effects of BioB overexpression in wild type and mutant background strains, proteomics measurements were carried out for a wild type background strain: BS1013 holding pBS430; a wild type iscR strain with a bioB production plasmid: BS1011 holding pBS412; and a mutant iscR strain with a bioB production plasmid: BS1353 holding pBS412. All strains were grown in mMOPS with 0.1 g/L DTB and 0.025 mM IPTG. The latter strain was additionally grown at 1 mM IPTG induction. Cells were harvested for proteomics analysis in exponential phase, while the remaining cell culture were kept incubating for 24 hours in total, before biotin production were measured using the bioassay described elsewhere.
From the graph (FIG. 11) the measured BioB protein level strongly correlates with the biotin production (R² value of 0.96). The linear correlation shows that facilitating enhanced BioB expression is a key to improve biotin production in IscR mutant cell factories. The ANOVA analysis of the proteomics data revealed a significant increase in expression (95% confidence interval, p-value of 0.00166) in additional 29 proteins. Among these are members of the isc-operon (IscA and IscS) and suf-operon (SufB and SufS).
1.15 Biotin Production is not Enhanced in iscR Knockout Mutants
A translational knockout of the iscR gene was introduced into a BW25113 ΔbioB strain by MAGE, by converting the codon encoding glutamic acid on position 22 in iscR (E, GAA) into a stopcodon (*, TGA). Successful conversion of the codon was verified by PCR amplification of the region followed by Sanger sequencing. Strains with genes encoding wild type iscR, iscR knockout (E22*), and mutant iscR (C92Y) were transformed with IPTG-inducible bioB plasmid pBS412, and tested for biotin production in biological replicates (n=3) grown in mMOPS supplemented with 0.1 g/L DTB and 50 μg/L kanamycin at three different IPTG induction levels (0, 0.01, and 0.1 mM) as described above.

[0267] No significant differences in biotin production were observed between the iscR knockout (iscR KO) and the wild type iscR (iscR WT) strains when inducing bioB expression by IPTG induction. This provides evidence that knocking out iscR does not improve biotin production. Significant improvement in biotin production was again observed for the mutant iscR encoding IscR C92Y substitution as compared to both iscR WT and iscR KO strains.

1.16 De-Novo Biotin Production is Enhanced in iscR Mutant Strains of the Invention
A BW25113 E. coli strain from which both the bioA gene and the entire biotin-operon (ΔbioB-bioD) were deleted and comprising either iscR WT, iscR H107Y mutant or iscR C92Y mutant genes, were transformed with a tetracycline resistant plasmid, constitutively overexpressing the native E. coli bioA and biotin-operon, with a single point mutation in the bioO operator site (Type 9 mutation, Ifuku et al., 1993). Biotin production was evaluated for the three different strains in biological replicates (n=4) in mMOPS (2 g glucose/L) with 10 μg/ml tetracycline with and without the addition of 0.1 g/L DTB as described above (FIG. 13).
A significant increase in biotin titers were observed for all three strains when the substrate, DTB, was added to the growth medium, indicating that the bioB enzyme reaction itself, converting DTB to biotin, is no longer a bottleneck for biotin production in these strains (FIG. 13). Furthermore, a significant increase in de-novo production of biotin from glucose was observed for both iscR mutant strains as compared to the iscR WT strain. On view of these results it may deduced that the mutant iscR strains of the invention all support enhanced biotin production from both the direct precursor, DTB, and from glucose.

### Example 2 Overexpression of a Flavodoxin/Ferredoxin Reductase (Fpr) and Flavodoxin (FldA) Reduction System to Increase Productivity of Genetically Modified E. coli Strains Capable of Producing Biotin

[0268] 2.01: The Following Strains of Escherichia coli Used in the Examples are Listed Below.

TABLE 4
Strains

| Name | Description |
|---|---|
| BS1011 | ΔbioB (JW0758-1) derivative of E. coli K-12 BW25113 parent strain having |
| | genotype: rrnB3 ΔlacZ4787 hsdR514 Δ(araBAD)567 Δ(rhaBAD)568 rph-1 |
| BS1353 | BS1011 derivative comprising a H107Y mutation in iscR |
| BS1615 | BS1011 derivative with additional deletion of ΔbioAFCD |
| BS1937 | BS1615 derivative comprising pBS679 plasmid giving IPTG - inducible BioB |
| | expression |
| BS2185 | BS1615 derivative comprising pBS679 plasmid giving IPTG - inducible BioB |
| | expression and pBS1112 giving constitutive FldA-Fpr expression |
| BS2707 | BS1615 derivative comprising pBS679 plasmid giving IPTG - inducible BioB |
| | expression and pBS1054 giving constitutive GFP expression |

The following plasmids used in the example are listed below.

TABLE 5
Plasmids

| Name | Description |
|---|---|
| pBS679 | BioB [SEQ ID No.: 34] overexpression plasmid (ampR, pSC101) from a T5 |
| | lacO repressed promoter [SEQ ID No: 37] and |
| PBS1054 | GFP [SEQ ID No.: 89] overexpression plasmid (kanR, pBR322) from a |
| | constitutive apFAB309 promoter [SEQ ID No.: 93] with an apFAB378 |
| | terminator [SEQ ID No.: 41]. |
| pBS1112 | FldA-Fpr overexpression plasmid (kanR, pBR322) from a constitutive |
| | apFAB306 promoter (apFAB306-FldA-Fpr gene- apFAB378 terminator [SEQ |
| | ID No: 90]) |

An IPTG-inducible transgene encoding BioB was cloned on plasmid pBS679; a constitutively-regulated transgene encoding GFP was cloned on plasmid pBS1054; and a constitutively-regulated transgene comprising a synthetic operon encoding FldA-Fpr was cloned on plasmid pBS1112. pBS679 was introduced into an E. coli host strain (BS1615) in which the native iscR gene was substituted by a mutant iscR gene encoding an IscR protein having an H107Y substitution, as described in Example 1, and further comprising a knock-out of the bioAFCD genes resulting in the strain BS1937. The strain BS1937 was then further transformed with either plasmid pBS1054 or pBS1112 resulting in the strains BS2707 (control strain) and BS2185, respectively.
The strains were cultured in mMOPS medium (as described in example 1.3) with appropriate antibiotic(s), 0.1 g/L DTB as substrate for BioB-mediated catalysis, and supplemented with either 0, 0.01, 0.025, 0.05, 0.075 or 0.1 mM IPTG for inducing expression of the BioB gene. The cells were incubated for 24 hours at 37° C. in individual wells of a deep well culture plate. End OD₆₀₀ₙₘ values were estimated, supernatants were harvested by centrifugation and biotin quantified from the supernatants by a biotin bioassay carried out as described in example 1.6.
As shown in FIG. 10 and FIG. 11 for strain BS1937, when BioB gene expression in E. coli cells comprising a genetically modified endogenous iscR gene, are induced with increasing concentrations of IPTG, the cells show a corresponding progressive increase in biotin production. Biotin production in these genetically modified cells is further enhanced 2.12-fold by the co-expression of a transgene encoding FldA-Fpr (strain BS2185) when compared with its parent strain BS1937, and with a control strain expressing a transgene encoding GFP instead of FldA-Fpr.

### Example 3: Engineering and Characterization of Genetically Modified E. coli Strains Capable of Enhanced Heme Production

[0269] 3.01 Heme Production by an IscR H107Y Mutant Strain Overexpressing hemN and hemB Genes.
The following strains of Escherichia coli used in the example are listed below.

TABLE 6
Strains

| Name | Description |
|---|---|
| BS1011 | ΔbioB (JW0758-1) derived from Escherichia coli K-12 BW25113 having |
| | genotype: rrnB3 ΔlacZ4787 hsdR514 Δ(araBAD)567 Δ(rhaBAD)568 |
| | rph-1 |
| BS1353 | BS1011 derivative comprising an H107Y mutation in iscR |
| BS3128 | BS1011 transformed with pBS1610 |
| BS3129 | BS1353 transformed with pBS1610 |
| BS3130 | BS1011 transformed with pBS1611 |
| BS3131 | BS1353 transformed with pBS1611 |
| BS3132 | BS1011 transformed with pBS1612 |
| BS3133 | BS1353 transformed with pBS1612 |
| BS2629 | BS1011 transformed with pBS1259 |
| BS2630 | BS1353 transformed with pBS1259 |

The following plasmids used in the example are listed below.

TABLE 7
Plasmids

| Name | Description |
|---|---|
| pBS1610 | Plasmid (AmpR, p15A) comprising an hemN gene [SEQ ID No.: 95] and |
| | hemB gene [SEQ ID No.: 109] operably linked to an IPTG-inducible T5 |
| | LacO repressed promoter [SEQ ID No.: 37] and a rrnB terminator [SEQ ID |
| | No.: 94]. |
| pBS1611 | Plasmid (AmpR, p15A) comprising an hemZ gene [SEQ ID No.: 106] and |
| | hemB gene [SEQ ID No.: 109] operably linked to an IPTG-inducible T5 |
| | LacO repressed promoter [SEQ ID No.: 37] and a rrnB terminator [SEQ ID |
| | No.: 94]. |
| pBS1612 | Plasmid (AmpR, p15A) comprising an hemF gene [SEQ ID No.: 108] and |
| | hemB gene [SEQ ID No.: 109] operably linked to an IPTG-inducible T5 |
| | LacO repressed promoter [SEQ ID No.: 37] and a rrnB terminator [SEQ ID |
| | No.: 94]. |
| pBS1259 | Control empty plasmid (AmpR, p15A) comprising a T5 LacO inducible |
| | promoter [SEQ ID No.: 39], a RBS, where AmpR is the sole open reading |
| | frame. |

IPTG-inducible genes encoding HemN and HemB were cloned to give plasmid pBS1610; and an empty plasmid pB51259 having a p15A backbone was used as a control. pBS1610 or pBS1259 were introduced into the E. coli host strain (BS1353) in which the native iscR gene was substituted by a mutant iscR gene encoding an IscR protein having an H107Y substitution (as described in Example 1) resulting in the strains BS3129 and BS2630, respectively. Similarly, the plasmids p651610 and pBS1259 were introduced into E. coli strain 651011 carrying a wild-type version of the iscR gene, resulting in strains 653128 and BS2629, respectively.
In addition, IPTG-inducible genes encoding HemZ and HemB were cloned to give plasmid pBS1611; and an empty plasmid pBS1259 having a p15A backbone was used as a control. pBS1611 or pBS1259 were introduced into the E. coli host strain (BS1353) in which the native iscR gene was substituted by a mutant iscR gene encoding an IscR protein having an H107Y substitution (as described in Example 1) resulting in the strains BS3131 and BS2630, respectively. Similarly, the plasmids pBS1611 and pBS1259 were introduced into E. coli strain BS1011 carrying a wild-type version of the iscR gene, resulting in strains BS3130 and BS2629, respectively.
Furthermore, IPTG-inducible genes encoding HemF and HemB were cloned to give plasmid pBS1612. pBS1611 was introduced into the E. coli host strain (BS1353) in which the native iscR gene was substituted by a mutant iscR gene encoding an IscR protein having an H107Y substitution (as described in Example 1) resulting in the strains BS3133. Similarly, the plasmids pBS1612 was introduced into E. coli strain 651011 carrying a wild-type version of the iscR gene, resulting in strain BS3132, respectively. The non iron-sulfur cluster hemF strains where used as controls.
Cells of each strain (Table 6) are cultivated in mMOPS medium (as described in Example 1.03) supplemented with 1 nmol/L biotin and 100 μg/mL ampicillin at 37° C. until a cell density (OD₆₀₀ₙₘ) of 0.6 is reached. IPTG is then added to the growth medium (to a final concentration of 0.1 mM) to induce HemN and HemB synthesis. Porphyrins including heme production were measured after 24 h by fluorescence spectroscopy in a microriter plate. Fluorescence values (ex. 240; em 620) are a quantitative measure of the production of porphyrin and heme production potential of the strains. FIG. 12C, D and E show the fluorescence of the production experiment 24 h after induction. Heme production by the cells is performed by additionally adding aminolaevulinic acid (ALA) to the medium at final concentration of 10 mM; in order to enhance HemB mediated-catalysis and flux through the heme pathway flux; and cultivating the cells for a further 48 h period under anaerobic conditions.
The free porphyrin and heme content of the cultured cells is determined according to Fyrestam and Oestman, 2017. Cells in each culture are centrifuged (17000 g, 5 min), the supernatant is discarded, and each cell pellet is re-suspended in Tris-EDTA pH 7.2 solution and the cells are sonicated in 5 sec bursts of 20-50 KHz. Each sonicated sample is then centrifuged (17000 g, 5 min) and the respective supernatant collected, followed by addition of 3 volumes of 100 w % acetonitrile. Each sample is vortexed for 5 min and centrifuged (2500 g, 5 min). Finally, the supernatant of each sample is collected for HPLC analysis using a C18 reverse-phase column; using a mobile phase consisting of water, acetonitrile and 0.1 M formic acid (pH 5.1-5.2). Free porphyrins and free heme titer of each collected sample is also quantified using a Quantichrom heme assay kit from BioAssay systems (coloration of porphyrins and reading at 400 nm).
The tests demonstrate that over-expression of a hemN gene encoding a hemN Fe—S polypeptide in combination with a HemB gene in an E. coli strain comprising a gene encoding a mutant form of the IscR protein (IscR protein having an C92Y or H107Y substitution) leads to both a more stable production and increased in the heme and prophyrin titer as compared to over-expression of the HemN and HemB-encoding gene in a parent E. coli strain comprising a gene encoding the native, wild-type form of the IscR protein. Furthermore, the test demonstrate that over-expression of a hemZ gene encoding a HemZ Fe—S polypeptide in combination with a HemB gene in an E. coli strain comprising a gene encoding a mutant form of the IscR protein (IscR protein having a H107Y substitution) leads to both a more stable production and increase in the heme and prophyrin titer as compared to over-expression of the HemN and HemB-encoding gene in a parent E. coli strain comprising a gene encoding the native, wild-type form of the IscR protein.
3.02 Heme Production in an IscR H107Y Mutant Strain Overexpressing ‘hemN or hemF’ Gene in Combination with hemALBCDEGH Genes
The parent E. coli used in the example listed below, is modified to knock-out the yfeX gene encoding a putative heme degradation enzyme; as well as to knock-out the pta and IdhA genes encoding phosphate acetyl transferase and lactate dehydrogenase, respectively, in order to enhance metabolic flux from glucose to L-glutamate. A derivative of the E. coli ΔyfeX-LdhA-Pta strain further comprises an iscR gene encoding an H107Y mutation in the iscR protein.

TABLE 8A

| Derivative of E. coli strain* | Plasmids comprising IPTG-inducible heme pathway |
|---|---|
| characterised by: | genes: |
| ΔyfeX-LdhA-Pta | pRSFhemBCD, pET-hemEFGH and pCDF-hemA(wt)L; |
| | KmR, ApR, SmR ** |
| ΔyfeX-LdhA-Pta H107Y IscR | pRSFhemBCD, pET-hemEFGH and pCDF-hemA(wt)L; |
| | KmR, ApR, SmR ** |
| ΔyfeX-LdhA-Pta | pRSFhemBCD, pET-hemENGH and pCDF-hemA(wt)L; |
| | KmR, ApR, SmR ** |
| ΔyfeX-LdhA-Pta H107Y IscR | pRSFhemBCD, pET-hemENGH and pCDF-hemA(wt)L; |
| | KmR, ApR, SmR ** |
| ΔYfeX-LdhA-Pta | pRSFhemBCD, pET-hemEFGH and pCDF-hemA(kk)L; |
| | KmR, ApR, SmR ** |
| ΔYfeX-LdhA-Pta H107Y IscR | pRSFhemBCD, pET-hemEFGH and pCDF-hemA(kk)L; |
| | KmR, ApR, SmR ** |
| ΔyfeX-LdhA-Pta | pRSFhemBCD, pET-hemENGH and pCDF-hemA(kk)L; |
| | KmR, ApR, SmR ** |
| ΔyfeX-LdhA-Pta H107Y IscR | pRSFhemBCD, pET-hemENGH and pCDF-hemA(kk)L; |
| | KmR, ApR, SmR ** |
| ΔyfeX-LdhA-Pta | pRSFhemBCD, pET-hemEFGH and pCDF-hemA(C107A)L; |
| | KmR, ApR, SmR ** |
| ΔyfeX-LdhA-Pta H107Y IscR | pRSFhemBCD, pET-hemEFGH and pCDF-hemA(C107A)L; |
| | KmR, ApR, SmR** |
| ΔyfeX-LdhA-Pta | pRSFhemBCD, pET-hemENGH and pCDF-hemA(C107A)L; |
| | KmR, ApR, SmR ** |
| ΔyfeX-LdhA-Pta H107Y IscR | pRSFhemBCD, pET-hemENGH and pCDF-hemA(C107A)L; |
| | KmR, ApR, SmR ** |

*E. coli strain: B F⁻ ompT gal dcm lon hsdS_{B}(r_{B}⁻ m_{B}⁻) λ(DE3 [lacl lacUV5-T7p07 ind1 sam7 nin5]) [malB⁺]_{K-12}(λ^{S})
** Resistance genes for Kanamycin (KmR), ampiciliin (ApR), streptomycin (SmR) in each respective plasmid.

The heme pathway genes, hemALBCDEGH and either hemN or hemF, cloned into 3 plasmid (see table BA), are transformed into a derivative of an E. coli parent strain comprising either wild-type or H107Y mutant IscR protein. Additionally, strains are constructed wherein the hemA gene is mutated to express either of the heme feedback-insensitive hemA proteins: hemA(kk) comprising (L2K; L3K) substitutions or hemA comprising an (C107A) substitution.
Cells of each strain (Table BA) are cultivated in biotin-supplemented mMOPS medium supplemented with 100 μg/mL ampicillin, 50 μg/mL spectinomycin and 50 μg/mL kanamycin at 37° C., including IPTG-induction of the heme pathway genes, and the heme and prophyrin titer of the cultured cells is determined as described in Example 3.01. Strains carrying the hemF gene are cultured under aerobic conditions. Hemne and prophyrin production by an E. coli strain over-expressing the genes of the heme pathway (i.e. hemALBCDEGH and hemN), and lacking yfeX-LdhA-Pta genes, is enhanced when the host strain expresses a gene encoding a mutant form of the IscR protein (IscR protein having an H107Y substitution) as compared to a strain expressing a gene encoding a native, wild-type IscR protein. This enhancement does not occur in strains expressing Hem F instead of HemN.
3.03 Hemeprotein Production in an IscR H107Y Mutant Strain Overexpressing ‘hemN or hemF’ in Combination with hemALBCDEGH Genes and a Cytochrome P450 Monooxygenase
The following strains of Escherichia coli used in the example are listed below.

TABLE 8B
plasmids

| Name | Description |
|---|---|
| pBS_Heme1 | pRSFhemBCD |
| pBS_Heme2 | pET-hemENGH |
| pBS_Heme3 | and pCDF-hemA(C107A)L-BM3* |

[0270] The heme pathway genes, hemALBCDEGH and either hemN or hemF as well as BM3* mutant gene derived from Bacillus megaterium, cloned into 3 plasmids (see table 88), are transformed into a derivative of an E. coli parent strain comprising either wild-type (ΔyfeX-LdhA-Pta) or H107Y mutant IscR protein (ΔyfeX-LdhA-Pta H107Y IscR), as shown in Table 8A.

[0271] Cells of each transformed strain are then cultivated in biotin-supplemented mMOPS medium supplemented with 100 μg/mL ampicillin, 50 μg/mL spectinomycin and 50 μg/mL kanamycin at 37° C., including IPTG-induction of the heme pathway genes and BM3*. Indole and NADPH are added as a substrate and cofactor of the P450 for a biotransformation. Indigo production by an E. coli strain over-expressing the monooxygenase gene BM3* and the genes of the heme pathway (i.e. hemALBCDEGH and hemN), and lacking yfeX-LdhA-Pta genes, is enhanced when the host strain expresses a gene encoding a mutant form of the IscR protein (IscR protein having an H107Y substitution) as compared to a strain expressing a gene encoding a native, wild-type IscR protein.

### Example 4 Engineering and Characterization of Genetically Modified E. coli Strains Capable of Enhanced Nicotinamide Riboside Production

[0272] 4.01 Enhanced Growth and Quinolinate Synthase Activity in an IscR H107Y Mutant Strain Overexpressing nadA Genes.
The following strains of Escherichia coli used in the example are listed below.

TABLE 9
Strains

| Name | Description |
|---|---|
| BS1011 | ΔbioB (JW0758-1) derived from Escherichia coli K-12 BW25113 having |
| | genotype: |
| | rrnB3 ΔlacZ4787 hsdR514 Δ(araBAD)567 ΔrhaBAD)568 rph-1 |
| BS1353 | BS1011 derivative comprising a H107Y mutation in iscR |
| BS2379 | BS1011 transformed with pBS1167 |
| BS2382 | BS1353 transformed with pBS1167 |
| BS2629 | BS1011 transformed with pBS1259 |
| BS2630 | BS1353 transformed with pBS1259 |
| BS_NR01 | BS1011 transformed with pBS_NR |
| BS_NR02 | BS1353 transformed with pBS_NR |
| BS_NAM01 | BS1011 transformed with pBS_NAM |
| BS_NAM02 | BS1353 transformed with pBS_NAM |
| BS_NA01 | BS1011 transformed with pBS_NA |
| BS_NA02 | BS1353 transformed with pBS_NA |

The following plasmids used in the example are listed below.

TABLE 10
Plasmids

| Name | Description |
|---|---|
| pBS1167 | Plasmid (AmpR, p15A) comprising a nadA gene [SEQ ID No.: 117] operably |
| | linked to a T5 LacO repressed promoter [SEQ ID No.: 37] and |
| | a rrnB terminator [SEQ ID No.: 94]. |
| pBS1259 | Control empty plasmid (AmpR, p15A) comprising a T5 LacO inducible |
| | promoter [SEQ ID No.: 37], an RBS, where AmpR is the sole open reading |
| | frame. |
| pBS1651 | Plasmid (AmpR, p15A) comprising nadAB genes[SEQ ID No.: 117 and 128] |
| | operably linked to a T5 LacO repressed promoter [SEQ ID No.: 37] and a rrnB |
| | terminator [SEQ ID No.: 94]. Constitutive promoter apFAB309 [SEQ ID No.: 93] |
| | and a rrnB terminator [SEQ ID No.: 94]. |
| pBS_NR | Plasmid (AmpR, p15A) comprising nadABCNadE*aphA genes [SEQ ID No.: 117, |
| | 128, 133, 129, and 130] operably linked to a T5 LacO repressed promoter [SEQ |
| | ID No.: 37] and a rrnB terminator [SEQ ID No.: 94]. Constitutive promoter [SEQ |
| | ID No.: 93] and a rrnB terminator [SEQ ID No.: 94]. |
| pBS_NAM | Plasmid (AmpR, p15A) comprising nadA, nadB, nadC, nadE* and chi genes |
| | encoding [SEQ ID No.: 117, 133, 129, 131, 132] operably linked to a |
| | T5 LacO repressed promoter [SEQ ID No.: 3] and a rrnB terminator [SEQ ID |
| | No.: 4]. Constitutive promoter [SEQ ID No.: 93] and a rrnB terminator [SEQ ID |
| | No.: 94]. |
| pBS_NA | Plasmid (AmpR, p15A) |
| | comprising nadB, nadC, nadE*, chi and pncA genes encoding [SEQ ID No.: |
| | 133, 129, 132, 131] operably linked to a T5 LacO repressed promoter [SEQ ID |
| | No.: 37] and a rrnB terminator [SEQ ID No.: 94]. Constitutive promoter [SEQ |
| | ID No.: 93] and a rrnB terminator [SEQ ID No.: 94]. |

IPTG-inducible genes encoding NadA (quinolate synthase) was cloned to give plasmid pBS1167; and an empty plasmid pBS1259 having a p15A backbone was used as a control. pBS1167 or pBS1259 were introduced into the E. coli host strain (BS1353) in which the native iscR gene was substituted by a mutant iscR gene encoding an IscR protein having an H107Y substitution (as described in Example 1) resulting in the strains BS2382 and BS2630, respectively. Similarly, the plasmids pBS1167 and pBS1259 were introduced into E. coli strain BS1011 carrying a wild-type version of the iscR gene, resulting in strains BS2379 and BS2629, respectively.
Cells of each strain (Table 9) are cultivated 24 h at 37° C. in parallel cultures comprising mMOPS medium (as described in Example 1.03) supplemented with 1 nmol/L biotin, 100 μg/mL ampicillin and with 0 to 1 mM IPTG in deep culture plates. Cell growth was monitored over 24 h by measuring cell density at OD₆₂₀ nm (FIG. 14). The lag-phase duration and growth rate of strains BS2629 (IscR WT) and BS2630 (IscR mutant), comprising control plasmids was similar under both non-inducing and inducing conditions. However, IPTG induction of nadA transgene expression resulted in an extended lag-phase and slower growth rate for IscR WT strain BS2379, indicating that NadA-overexpression is toxic for growth. This growth deficiency is largely overcome when the nadA gene is overexpressed in the IscR mutant strain BS2382. This demonstrates that the IscR mutant strain provides sufficient Fe—S clusters to meet the functional requirements of both over-expressed NadA and other native Fe—S proteins in the cell and to thereby support cell growth.

[0273] The catalytic activity of NadA expressed in IscR wild type (BS1011) and mutant (BS1353) E. coli strains transformed with pBS1651 or pBS1259 is determined by measuring quinolate, an intermediate in the NR pathway. Cells of each strain are grown in 50 ml mMOPS medium, with or without aspartic acid, supplemented with 1 nmol/L biotin, 100 μg/mL ampicillin, at 37° C. and 250 rpm until the OD₆₀₀ₙₘ reaches 0.6. IPTG is then added to each culture to a final concentration of 0.064 mM, that are then incubated for a further 6 h. Every hour, a 1 mL aliquot, sampled from each culture, is normalized to the same cell density (OD₆₀₀ nm) and then pelleted with centrifugation at 17000 g for 5 min. Pellets, after washing in ice-cold PBS (phosphate buffer saline) solution, are re-suspended, and then lysed by sonication and finally centrifuged at 17000 g for 5 min. Quinolate, present in the recovered lysed cell supernatant, is measured by LC-MS using a 1290 Infinity series UHPLC coupled to a 6470 triple quadrupole from Agilent Technologies (Santa Clara, USA) as described by Ollagnier-de Choudens et. al., (2005). Alternatively HPLC can applied in stead af LC-MS. Quinolate production is also quantified in the supernatant by HPLC. Cells of each strain are grown in 50 ml mMOPS medium, without aspartic acid, supplemented with 1 nmol/L biotin, 100 μg/mL ampicillin, and IPTG concentration between 0-1 mM and incubated at 37° C. for 24 h. FIG. 14B shows the production of quinolate at 24 h in wild type and mutant strains carrying NadAB. The tests demonstrate that over-expression of a nadA gene encoding a NadA Fe—S polypeptide in combination with a nadB gene in an E. coli strain comprising a gene encoding a mutant form of the IscR protein (IscR protein having a H107Y substitution) leads to both a more stable production and increased quinolate titer as compared to over-expression of the NadA and NadB-encoding gene in a parent E. coli strain comprising a gene encoding the native, wild-type form of the IscR protein.

4.02 Enhanced Nicotinamide Riboside (NR) Production in an IscR H107Y Mutant Strain Overexpressing nadABC, nadE* and aphA Genes

[0274] The parent E. coli strain BS1011, and its mutant derivative expressing IscR H107Y, are transformed with a plasmid (pBS_NR) comprising the genes nadABCE*aphA operatively linked an IPTG inducible promoter, or with a control empty plasmid. The genes expressed in plasmid pBS_NAM include: E. coli nadA gene encodes quinolate synthase (NadA); the E. coli nadB encodes L-aspartate oxidase (NadB); nadC encodes Nicotinate-nucleotide pyrophosphorylase (NadC); aphA encodes a Class B acid phosphatase (AphA); and the Mannheimia succiniciproducens nadE gene encodes a polypeptide with nicotinic acid mononucleotide amidating activity (NadE*). Cells of each strain are grown in 50 ml mMOPS medium, supplemented with 1 nmol/L biotin, 100 μg/mL ampicillin, at 37° C. and 250 rpm until the OD600 nm reaches 0.6. IPTG is then added to each culture to a final concentration of 0.064 mM that are then incubated for a further 6 h, and subsequently lysed.

[0275] NR, present in the recovered lysed cell supernatant, is measured by LC-MS using a 1290 Infinity series UHPLC coupled to a 6470 triple quadrupole from Agilent Technologies (Santa Clara, USA) (Ollagnier-de Choudens et. al., 2005). NR production by an E. coli strain expressing the genes of the NR pathway (i.e. nadABCE*aphA), is enhanced when the host strain expresses a gene encoding a mutant form of the IscR protein (IscR protein having an H107Y substitution) as compared to a strain expressing a gene encoding a native, wild-type IscR protein.

[0276] Cells of each strain are grown in 50 ml mMOPS medium, supplemented with 1 nmol/L biotin, 100 g/mL ampicillin, at 37° C. and 250 rpm until the OD600 nm reaches 0.6. IPTG is then added to each culture to a final concentration of 0.064 mM that are then incubated for a further 6 h, and subsequently lysed.

[0277] NR, present in the recovered lysed cell supernatant, is measured by LC-MS using a 1290 Infinity series UHPLC coupled to a 6470 triple quadrupole from Agilent Technologies (Santa Clara, USA) (Ollagnier-de Choudens et. al., 2005). NR production by an E. coli strain expressing the genes of the NR pathway (i.e. nadABCE*aphA), is enhanced when the host strain expresses a gene encoding a mutant form of the IscR protein (IscR protein having an H107Y substitution) as compared to a strain expressing a gene encoding a native, wild-type IscR protein.

4.03 Enhanced Nicotinamide (NAM) Production in an IscR H107Y Mutant Strains Overexpressing nadABC, nadE* and NMN Nucleosidase (Chi) Genes.

[0278] For nicotinamide NAM production E. coli strain BS1011, and its mutant derivative expressing IscR H107Y, are transformed with a plasmid (pBS_NAM) comprising the genes nadABCE* and chi operatively linked an IPTG inducible promoter, or with a control empty plasmid. The genes expressed in plasmid pBS_NAM include: E. coli nadA gene encodes quinolate synthase (NadA); the E. coli nadB encodes L-aspartate oxidase (NadB); nadC encodes Nicotinate-nucleotide pyrophosphorylase (NadC); chi encodes NMN nucleosidase (chi) and the Mannheimia succiniciproducens nadE* gene encodes a polypeptide with nicotinic acid mononucleotide amidating activity.

### Example 5 Engineering and Characterization of Genetically Modified E. coli Strains Capable of Enhanced Production Cobalamin

[0279] 5.01 Enhanced Precorrin-3B Synthase Activity in an IscR H107Y Mutant Strain Overexpressing a cobG Gene.
The following strains of Escherichia coli used in the example are listed below.

TABLE 11
Strains

| Name | Description |
|---|---|
| BS1011 | ΔbioB (JW0758-1) derived from Escherichia coli K-12 BW25113 having |
| | genotype: rrnB3 ΔlacZ4787 hsdR514 Δ(araBAD)567 Δ(rhaBAD)568 rph- |
| | 1 |
| BS1011, IdhA::cbiNQOM | BS1011 derivative comprising an operon comprising cbiNQOM genes |
| | inserted into the genome |
| BS1353 | BS1011 derivative comprising a H107Y mutation in iscR |
| BS1353 IdhA::cbiNQOM | BS1353 derivative comprising an operon comprising cbiNQOM genes |
| | inserted into the genome |
| BS2629 | BS1011 transformed with pBS1259 |
| BS2630 | BS1353 transformed with pBS1259 |
| BS4137 | BS1011 transformed with pBS1288 and pBS1637 |
| BS4138 | BS1353 transformed with pBS1288 and pBS1637 |
| BS4139 | BS1353 transformed with pBS1288 |
| BS4140 | BS1011 transformed with pBS1288 |
| BS4141 | BS1011, IdhA::cbiNQOM transformed with pBS1738, pBS1749, |
| | PBS1750 |
| BS4142 | BS1353 IdhA::cbiNQOM transformed with pBS1738, pBS1749, |
| | PBS1750 |

The following plasmids used in the example are listed below.

TABLE 12
Plasmids

| Name | Description |
|---|---|
| pBS1288 | Plasmid (AmpR, p15A) comprising CobG [SEQ ID No.: 135] operably |
| | linked to a T5 LacO repressed promoter [SEQ ID No.: 37] and a rrnB |
| | terminator [SEQ ID No.: 94]. |
| pBS1259 | Control empty plasmid (AmpR, p15A) comprising a T5 LacO repressed |
| | promoter [SEQ ID No.: 2] and a rrnB terminator [SEQ ID No.: 94] but |
| | no additional open reading frame. |
| pBS1637 | Plasmid (pBR322; KanR) comprising the operon of genes CobIMF |
| | encoding [SEQ ID No.: 146, 147, 148] operably linked to a constitutive |
| | promoter apFAB309 [SEQ ID No.: 93] and a FAB terminator [SEQ ID |
| | No.: 27]; second operon of genes CobKHLJ encoding [SEQ ID No.: 149, |
| | 150, 151, 152] from a constitutive promoter apFAB309 [SEQ ID No.: |
| | 93] and a FAB terminator [SEQ ID No.: 27], |
| pBS1748 | Plasmid (AmpR, p15A) comprising CobG [SEQ ID No.: 135] operably |
| | linked to a T5 LacO repressed promoter [SEQ ID No.: 37] and a rrnB |
| | terminator [SEQ ID No.: 94] and an operon of genes CobHIJLFK |
| | encoding [SEQ ID No.: 150, 146, 152, 151, 148, 149] from a |
| | constitutive promoter apFAB309 [SEQ ID No.: 93] and a FAB |
| | terminator [SEQ ID No.: 27]. |
| pBS1749 | Plasmid (pBR322; KanR) comprising the operon of genes CobMNST |
| | encoding [SEQ ID No.: 147, 153-155] operably linked to a constitutive |
| | promoter apFAB309 [SEQ ID No.: 93] and a FAB terminator [SEQ ID |
| | No.: 27]; second operon of genes CobROQBtuR [SEQ ID No.: 156, 157, |
| | 158, 159,] from a constitutive promoter apFAB309 [SEQ ID No.: 93] |
| | and a FAB terminator [SEQ ID No.: 27]. |
| pBS1750 | Plasmid (pSC101, SpecR) comprising the operon of genes |
| | CobCDTPduX [SEQ ID No.: 162, 161, 163, 166] operably linked to a |
| | constitutive promoter apFAB309 [SEQ ID No.: 93] and a FAB |
| | terminator [SEQ ID No.: 27]; second operon of genes CobUSCbiB [SEQ |
| | ID No.: 160, 164, 165] from a constitutive promoter apFAB309 [SEQ |
| | ID No.: 93] and a FAB terminator [SEQ ID No.: 27]. |

[0280] IPTG-inducible gene encoding CobG (precorrin-3B synthase) was cloned into plasmid pBS1288; and an empty plasmid pBS1259 having a p15A backbone was used as a control. A first operon encoding CobIMF and a second operon encoding CobKHLJ was cloned on a further plasmid pBS1637. The plasmid pBS1288 (alone) or in combination with pBS1637; or pBS1259 alone were introduced into the E. coli host strain (BS1353) in which the native iscR gene was substituted by a mutant iscR gene encoding an IscR protein having an H107Y substitution (as described in Example 1) resulting in the strains BS4139, BS4138 and BS2630, respectively. Additionally, pBS1288 (alone), or in combination with pBS1637, or pBS1259 alone were introduced into E. coli strain BS1011 carrying a wild-type version of the iscR gene, resulting in strains BS4140, B43137 and BS2629, respectively.

[0281] Cells of each strain (Table 11) are cultivated aerobically at 37° C. in parallel cultures comprising mMOPS medium (as described in Example 1.03) supplemented with 1 nmol/L biotin, 100 μg/mL ampicillin (and additionally 50 μg/ml kanamycin for strains BS4137 and BS4138 or 50 μg/mL spectomycin for BS4141 and BS4142). When each culture reaches a cell density of 0.8-1.0 OD₆₀₀ₙₘ, the culture medium is supplemented with 10 mM aminolaevulinic acid and 0.1 mM IPTG to induce cobG transgene expression, and incubated for at 28° C. for 24-48 h.

[0282] The catalytic activity of CobG transgenically expressed in the mutant E. coli strain (BS4139) as compared its expression in the IscR wild type (BS4140) is shown to be enhanced when determined by measuring hydrogenobyrinic acid (HBA) production, an intermediate in the Cob pathway, as follows. The cultured cells, harvested by centrifugation (17000 g, 5 min), are resuspended in IEX-Buffer A (20 mM Tris-HCl, pH 7.4, 100 mM NaCl); sonicated, centrifuged (17000 g 5 min), and the supernatant is then used for detection of HBA via LC-MS using a 1290 Infinity series UHPLC coupled to a 6470 triple quadrupole from Agilent Technologies (Santa Clara, USA).

[0283] The production of the intermediate, HBA, is further enhanced in the IscR mutant strain, BS4138, where the transgene encoding CobG and the transgenes encoding CobIMF and CobKHLJ are co-expressed in the cells, as compared to the parent host E. coli strain expressing wild type IscR (BS4137).

### 5.02 Enhanced Cobalamin Production in an IscR H107Y Mutant Strain Overexpressing the Cobalamin Pathway Genes

[0284] Cobalamin is produced by E. coli cells expressing an IPTG inducible transgene encoding CobG and a constitutively expressing transgenes encoding transgenes encoding CobHIJLFK, CobMNST, CobCDTPduX, CobROQBtuR and CobUSCbiB; and where the host E. coli cells further comprise the transgenes cbiNQOM inserted into their genome. E. coli strains BS4141 and BS4142 are cultured as described in 5.01 above. Cobalamin produced by the cultures is measured as follows: 2.5 mL of NaNO₂ 8% (w/v) and 2.5 mL of glacial acetic acid are added to 25 mL samples of each culture; which are then boiled for 30 min, and the resulting mixture filtered. Then 20 μL NaCN 10% (w/v) is added to 1 mL of aqueous phase; and 20 μL of resulting upper aqueous phase is injected into an HP1100 HPLC system (Agilent). NH2 column (4.6×250 mm², 5 um) is employed for HPLC analysis with a flow rate of 1.7 ml/min and a wavelength of 360 nm, using a mobile phase of 250 mM phosphoric acid/acetonitrile (30/70, v/v). The production of cobalamin is enhanced when said host E. coli cells comprise the mutant iscR gene (BS4142) as compared to host E. coli cells comprising the WT iscR gene (BS4141).

### Example 6 Engineering and Characterization of Genetically Modified E. coli Strains Capable of Enhanced Production of 3-Methyl-2-Oxobutanoate and 3-Methyl-2-Oxopentanoate and their Derivatives

[0285] 6.01 Enhanced Growth and Dihydroxy-Acid Dehydratase Activity in an IscR H107Y Mutant Strain Overexpressing ilvD Gene.
The following strains of Escherichia coli used in the example are listed below.

TABLE 13
Strains

| Name | Description |
|---|---|
| BS1011 | ΔbioB (JW0758-1) derived from Escherichia coli K-12 BW25113 having |
| | genotype: rrnB3 ΔlacZ4787 hsdR514 Δ(araBAD)567 Δ(rhaBAD)568 rph- |
| | 1 |
| BS1353 | BS1011 derivative comprising a H107Y mutation in iscR |
| BS2378 | BS1011 transformed with pBS1140 |
| BS2381 | BS1353 transformed with pBS1140 |
| BS2629 | BS1011 transformed with pBS1259 |
| BS2630 | BS1353 transformed with pBS1259 |
| BS2631 | BS1011 transformed with pBS1140 and pBS1652 |
| BS2632 | BS1353 transformed with pBS1140 and pBS1652 |
| BS3313 | BS1011 (ΔaceFΔmdh ΔpfkA) |
| BS3314 | BS1353 (ΔaceFΔmdh ΔpfkA) |
| BS3315 | BS3313 with pBS1768 and pBS1767 |
| BS3316 | BS3314 (ΔaceFΔmdh ΔpfkA) with pBS1768 and pBS1767 |

The following plasmids used in the example are listed below.

TABLE 14
Plasmids

| Name | Description |
|---|---|
| pBS1140 | Plasmid (AmpR, p15A) comprising an ilvD gene [SEQ ID No.: 15] operably linked to a |
| | T5 LacO repressed promoter [SEQ ID No.: 37] and a rrnB terminator [SEQ ID No.: 94]. |
| pBS1259 | Control empty plasmid (AmpR, p15A) comprising a T5 LacO inducible promoter [SEQ ID |
| | No.: 39], a RBS [SEQ ID No.: 4], where AmpR is the sole open reading frame. |
| pBS1652 | Plasmid (KanR, pBR322) comprising ilvCBN encoding [SEQ ID No.: 185, 183, 184] operably |
| | linked to the constitutive promoter [SEQ ID No.: 14] and a rrnB terminator [SEQ ID No.: |
| | 94]. |
| pBS1767 | Plasmid (p15A; AmpR) comprising an ilvD gene [SEQ ID No.: 15] operably linked to a |
| | T5 LacO repressed promoter [SEQ ID No.: 3] and a rrnB terminator [SEQ ID No.: 94]. |
| | Second operon of genes ilvBNbisCE [SEQ ID No.: 183, 187, 185, 186] from a constitutive |
| | promoter apFAB309 [SEQ ID No.: 93] and a FAB terminator [SEQ ID No.: 27]. |
| pBS1768 | Plasmid (pSC101; SpecR)comprising the genes ygaZHIrp [SEQ ID No.: 188, 189, 190] |
| | operably linked to a constitutive promoter apFAB309 [SEQ ID No.: 93] and a FAB terminator |
| | [SEQ ID No.: 27] |

IPTG-inducible gene encoding IlvD (dihydroxy-acid dehydratase) was cloned to give plasmid pBS1140; and an empty plasmid pBS1259 having a p15A backbone was used as a control. pBS1140 or pBS1259 were introduced into the E. coli host strain (BS1353) in which the native iscR gene was substituted by a mutant iscR gene encoding an IscR protein having an H107Y substitution (as described in Example 1) resulting in the strains BS2381 and BS2630, respectively. Similarly, the plasmids pBS1140 or pBS1259 were introduced into E. coli strain BS1011 carrying a wild-type version of the iscR gene, resulting in strains BS2378 and BS2629, respectively.

[0286] Cells of each strain (Table 13) are cultivated 24 h at 37° C. in parallel cultures comprising mMOPS medium (as described in Example 1.03) supplemented with 1 nmol/L biotin, 100 μg/mL ampicillin and with 0 to 1 mM IPTG in deep culture plates. Cell growth was monitored over 24 h by measuring cell density at OD₆₂₀ (FIG. 17). The lag-phase duration and growth rate of strains BS2629 (IscR WT) and BS2630 (IscR mutant), comprising control plasmids was similar under both non-inducing and inducing conditions. However, IPTG induction of ilvD transgene expression resulted in an extended lag-phase and slower growth rate for IscR WT strain BS2378, indicating that IlvD-overexpression is toxic for the cells. This growth deficiency is largely overcome when the ilvD gene is overexpressed in the IscR mutant strain BS2381. This demonstrates that the IscR mutant strain provides sufficient Fe—S clusters to meet the functional requirements of both over-expressed IlvD protein and other native Fe—S proteins in the cell and to thereby support cell growth.

[0287] The catalytic activity of IlvD expressed in IscR wild type (BS1011) and mutant (BS1353) E. coli strains transformed with pBS1140 or pBS1259 is determined by measuring 3-methyl-2-oxobutanoate, produced from 2,3-dihydroxy-3-methylbutanoate by dihydroxy-acid dehydratase. Cells of each strain are grown as described above; the cultures are normalized for cell density, and then subsequently pelleted at 17,000 g, where the supernatant is passed through a cation separation column and the eluant is then subsequently analysed for 3-methyl-2-oxobutanoate, amino acid and pantothenic acid content by LC-MS using a 1290 Infinity series UHPLC coupled to a 6470 triple quadrupole from Agilent Technologies (Santa Clara, USA) as described by Ollagnier-de Choudens et. al., (2005).

6.02 Enhanced Valine Production in an IscR H107Y Mutant Strain Overexpressing ilvD, ilvC, ilvB and ilvN Genes

[0288] The parent E. coli strain BS1011, and its mutant derivative expressing IscR H107Y BS1353, are transformed with a plasmid (pBS1652) comprising the genes ilvC, ilvB and ilvN operably linked a constitutive promoter, and pBS1140 comprising the ilvD gene, or only the control empty plasmid pBS1259. The E. coli ilvC gene in plasmid pBS1652 encodes ketol-acid reductoisomerase (NADP⁺); E. coli ilvB encodes acetolactate synthase isozyme 1 large subunit; and E. coli ilvN encodes acetolactate synthase isozyme 1 small subunit.

[0289] Cells of each strain are cultivated aerobically in 50 mL of NM1 Medium (NM1 composition: glucose, 20 g; (NH4)2SO4, 20 g; KH2PO4, 2.0 g; MgSO4, 7H2O, 0.4 g; NaCl, 1.6 g; yeast extract, 2 g; trace metal solution, supplemented with 1 nmol/L biotin, 100 μg/mL ampicillin, 50 μg/mL kanamycin, at 31° C. and 250 rpm until reaching a cell density of OD₆₀₀ reaches 0.4. IPTG is then added to the medium at a concentration of 0,028 mM and cells are further incubated for 24 h. 3-methyl-2-oxobutanoate produced in the culture medium by each strain, following normalization for cell density, is measured as described above.

[0290] The production of 3-methyl-2-oxobutanoate is enhanced in the IscR mutant strain, BS2632, when co-expressing the transgene encoding ilvD and the transgenes encoding ilvCBN, as compared to their co-expression in the parent host E. coli strain expressing wild type IscR (BS2631).

6.03 Enhanced L-Valine Production in an IscR H107Y Mutant Strain Overexpressing ilvD, ilvE, ilvC, ilvB and ilvNbis as Well as ygaZH and IrP.

[0291] The parent E. coli strain BS1011, and its mutant derivative expressing IscR H107Y B51353, are first genomically engineered to yield the strains BS3313 and BS3314. BS3313 and BS3314 are transformed with a plasmid (pBS1767) comprising the genes ilvD operatively linked to a T5 LacO promoter, and ilvE, ilvC, ilvB and ilvNbis operatively linked a constitutive promoter, and pBS1768 comprising the ygaZH and IrP gene. The E. coli ilvC gene in plasmid pBS1652 encodes ketol-acid reductoisomerase (NADP⁺); E. coli ilvB encodes acetolactate synthase isozyme 1 large subunit; E. coli ilvNbis encodes a mutated acetolactate synthase isozyme 1 small subunit. E. coli ilvE encodes a branched-chain-amino-acid aminotransferase; E. coli ygaH encodes a valine transporter; E. coli ygaz encodes a inner membrane protein; and E. coli IrP encodes a leucine-responsive regulatory protein.

[0292] Cells of each strain are cultivated aerobically in 50 mL of NM1 Medium (NM1 composition: glucose, 20 g; (NH4)2SO4, 20 g; KH2PO4, 2.0 g; MgSO4, 7H2O, 0.4 g; NaCl, 1.6 g; yeast extract, 2 g; trace metal, solution, supplemented with 1 nmol/L biotin, 100 μg/mL ampicillin, 50 μg/ml kanamycin, at 31° C. and 250 rpm until reaching a cell density of OD600ₙₘ reaches 0.4. IPTG is then added to the medium at a concentration of 0,028 mM and cells are further incubated for 24 h. L-valine produced in the culture medium by each strain, following normalization for cell density, is measured as described in 6.01.

[0293] L-valine production is enhanced in the IscR mutant strain, BS3316, when co-expressing the transgene encoding ilvD and the transgenes encoding ilvE, ilvC, ilvB and ilvNbis as well as ygaZH and IrP as compared to expression in a host E. coli strain expressing wild type IscR (BS3315).

### Example 7 Engineering and Characterization of Genetically Modified E. coli Strains Capable of Enhanced Production of Isoprenoids

[0294] 7.01 Enhanced Isoprenoid Precursor Synthesis Activity in an IscR H107Y Mutant Strain Overexpressing ispG and ispH Genes.
The following strains of Escherichia coli used in the example are listed below.

TABLE 15
Strains

| Name | Description |
|---|---|
| BS3317 | BS1011 (ΔbioB ΔytjC; genRBS dxs, rpos, idi, dxr) |
| BS3318 | BS3317 derivative comprising a H107Y mutation in iscR |
| BS3140 | BS3317 transformed with pBS1139 |
| BS3141 | BS3318 transformed with pBS1139 |
| BS3142 | BS3317 transformed with pBS1259 |
| BS3143 | BS3318 transformed with pBS1259 |

The following plasmids used in the example are listed below.

TABLE 16
Plasmids

| Name | Description |
|---|---|
| pBS1139 | Plasmid (AmpR, p15A) comprising an ispG gene [SEQ ID No.: 191] and an ispH gene [SEQ |
| | ID No.: 202] operably linked to a T5 LacO repressed promoter [SEQ ID No.: 37] and |
| | a rrnB terminator [SEQ ID No.: 94]. |
| pBS1259 | Control empty plasmid (AmpR, p15A) comprising a T5 LacO inducible promoter [SEQ ID |
| | No.: 39], a RBS, where AmpR is the sole open reading frame. |

[0295] IPTG-inducible genes encoding IspG (4-hydroxy-3-methylbut-2-en-1-yl diphosphate synthase) and IspH (4-hydroxy-3-methylbut-2-enyl diphosphate reductase) were cloned to give plasmid pBS1139; and an empty plasmid pBS1259 having a p15A backbone was used as a control. pBS1139 or pBS1259 were introduced into the E. coli host strain (BS3318) in which the native iscR gene was substituted by a mutant iscR gene encoding an IscR protein having an H107Y substitution (as described in Example 1) resulting in the strains BS3141 and BS3143, respectively. Similarly, the plasmids pBS1139 or pBS1259 were introduced into E. coli strain BS3317 carrying a wild-type version of the iscR gene, resulting in strains BS3140 and BS3142, respectively. The E. coli host strains BS3317 and BS3318 (comprising the native iscR and mutant iscR genes respectively) are genetically modified to upregulate expression of the genes dxs, rpoS, idi and dxr; and to delete the gene ytjC. The native ribosomal binding site (RBS), upstream of these genes, is modification being the substituted with an optimized RBS sequence [dxsRBS, SEQ ID NO: 280]; [rpoSRBS, SEQ ID NO:282]; [idiRBS, SEQ ID NO: 284]; [dyrRBS, SEQ ID NO: 286]. Cells of each strain (Table 15) are cultivated 24 h at 30° C. in parallel cultures comprising LB medium supplemented with 100 μg/mL ampicillin at 250 rpm until reaching a cell density of OD600ₙₘ of 0.6. IPTG is then added to the medium at a concentration of 0.1 mM and cells are further incubated for 24 h. Next, a 6 mL cell suspension aliquot having an OD600 nm of 1.0 is centrifuged for 5 min (17000×g), and re-suspended in 10 mL acetonitrile/methanol/water 40:40:20 plus 0.1 M formic acid intracellular metabolite extraction. The sample is incubated at −20° C. for 60 min with periodic shaking. Following centrifugation as before, the supernatant is purified through a LC-NH2 resin and analyzed for the isoprenoid precursors, IPP and DMAPP, using a 1290 Infinity series UHPLC coupled to a 6470 triple quadrupole from Agilent Technologies (Santa Clara, USA), as described by Zhou K et al., 2012.

[0296] The catalytic activity of IspG and IspH expressed in IscR mutant (BS3140) E. coli strains transformed with pBS1139, as compared to Isc WT (BS3139) E. coli strain transformed with pBS1139 or pBS1259 is increased based on the increase in detected levels of the precursors IPP and DMAPP produced.

### Example 8 Engineering and Characterization of Genetically Modified E. coli Strains Capable of Enhanced Production of L-Glutamic Acid

[0297] 8.01 Enhanced L-Glutamic Acid Synthesis Activity in an IscR H107Y Mutant Strain Overexpressing gltB and gltD Genes.
The following strains of Escherichia coli used in the example are listed below.

TABLE 17
Strains

| Name | Description |
|---|---|
| BS1011 | ΔbioB (JW0758-1) derived from Escherichia coli K-12 BW25113 having |
| | genotype: rrnB3 ΔlacZ4787 hsdR514 Δ(araBAD)567 Δ(rhaBAD)568 rph-1 |
| BS1353 | BS1011 derivative comprising a H107Y mutation in iscR |
| BS_glt01 | BS1011 derivative comprising a pBS_gltBD giving IPTG inducible gltB and |
| | gltD expression |
| BS_glt02 | BS1353 derivative comprising a pBS_gltBD giving IPTG inducible gltB and |
| | gltD expression |
| BS_glt03 | BS1011 derivative comprising a pBS_gltB giving IPTG inducible gltB and |
| | gltD expression |
| BS_glt04 | BS1353 derivative comprising a pBS_gltB giving IPTG inducible gltB |
| | expression |
| BS_glt05 | BS1011 derivative comprising a pBS_gltD giving IPTG inducible gltD |
| | expression |
| BS_glt06 | BS1353 derivative comprising a pBS_gltD giving IPTG inducible gltD |
| | expression |
| BS2629 | BS1011 derivative comprising pBS1259 as an empty vector control |
| BS2630 | BS1353 derivative comprising pBS1259 as an empty vector control |
| BS3326 | BS1011 derivative comprising pBS1769 |
| BS3327 | BS1353 derivative comprising pBS1769 |

The following plasmids used in the example are listed below.

TABLE 18
Plasmids

| Name | Description |
|---|---|
| pBS_gltBD | Plasmid (AmpR, p15A) comprising genes GltB [SEQ ID No.: 219] and GltD |
| | [SEQ ID No.: 231] operably linked to a T5 LacO repressed promoter [SEQ |
| | ID No.: 39] and a rrnB terminator [SEQ ID No.: 94]. |
| pBS1259 | Control empty plasmid (AmpR, p15A) comprising a T5 LacO inducible |
| | promoter [SEQ ID No.: 39], a RBS [SEQ ID No.: 4], where AmpR is the sole |
| | open reading frame. |
| pBS_gltB | Plasmid (AmpR, p15A) comprising gene GltB [SEQ ID No.: 219] operably |
| | linked to a T5 LacO repressed promoter [SEQ ID No.: 37] and a rrnB |
| | terminator [SEQ ID No.: 94]. |
| pBS_gltD | Plasmid (AmpR, p15A) comprising gene GltD [SEQ ID No.: 231] operably |
| | linked to a T5 LacO repressed promoter [SEQ ID No.: 37] and a rrnB |
| | terminator [SEQ ID No.: 94]. |
| pBS1769 | Plasmid (AmpR, p15A) comprising genes GltB [SEQ ID No.: 219] and GltD |
| | [SEQ ID No.: 231] operably linked to a T5 LacO repressed promoter [SEQ |
| | ID No.: 37] and a rrnB terminator [SEQ ID No.: 94]. Second open reading |
| | frame comprises genes gltXHemAL encoding [SEQ ID No: 240, 107, 108] |
| | operably linked to a constitutive promoter apFAB309 [SEQ ID No.: 93] and a FAB terminator |
| | [SEQ ID No.: 27]. |

[0298] IPTG-inducible genes encoding GltB (Glutamate synthase [NADPH] large chain) and GltD (Glutamate synthase [NADPH] small chain) were individually cloned to give plasmids pBS_gltB and pBS_glD respectively, as well as the two genes being cloned together to give plasmid pBS_gltBD (encoding both polypeptides of GOGAT); and an empty plasmid pBS1259 having a p15A backbone was used as a control. Each of the 3 plasmids (pBS_gltB; pBS_glD; pBS_gltBD and pBS1259) were individually introduced into the E. coli host strain (BS3149) in which the native iscR gene was substituted by a mutant iscR gene encoding an IscR protein having an H107Y substitution (as described in Example 1) resulting in the strains pBS_glt04, pBS_glt06, pBS_glt02 and BS2630, respectively. Similarly, these plasmids were introduced into E. coli strain BS1353 carrying a wild-type version of the iscR gene, resulting in strains BS_glt03, BS_glt05, BS_glt01, BS2629 respectively.

Overnight 500 uL seed cultures of each strain (Table 17) are cultivated in parallel at 37° C. in 50 mL LB medium supplemented with 100 μ/mL ampicillin and 5 g/l of NH4(SO4) as nitrogen source at 200 rpm until the cell density reaches an OD600ₙₘ of 0.8-1.0. IPTG is then added to the medium at a concentration of 0.1 mM of each culture, together with glutamine at a range of concentrations; and the cell cultures are further incubated at 28° C. for 24-48 h. Cells from each culture are then harvested by centrifugation (17000 g, 5 min). The supernatant is collected and used for detection of extracellular glutamate by colorimetric assay (#K629-100, Biovision, Milpitas, Calif., USA). Additionally, L-Glutamate is quantified via LC-MS using a 1290 Infinity series UHPLC coupled to a 6470 triple quadrupole from Agilent Technologies (Santa Clara, USA).
The catalytic activity of GOGAT, expressed in the IscR mutant E. coli strain transformed with pBS_gltBD (strain BS_glt02), as compared GOGAT expressed in Isc WT E. coli strain transformed with pBS_gltBD (BS_glt01), or either E. coli strain transformed with the control empty plasmid or plasmids pBS_gltB or pBS_gltD is increased, based on an increase in detected levels of L-glutamine produced.
8.02 Enhanced Aminolevulonic Acid Synthesis Activity in an IscR H107Y Mutant Strain Overexpressing gltB and gltD Genes Alongside Gltx, hemA and hemL Genes.
IPTG-inducible genes encoding GltDB (Glutamate synthase) and constitutively expressed GltX (Glutamate-tRNA ligase), HemA (Glutamyl-tRNA reductase), HemL (Glutamate-1-semialdehyde 2,1-aminomutase) were cloned to give the plasmid pBS1769. pBS1769 was introduced into the E. coli host strain (BS1353) in which the native iscR gene was substituted by a mutant iscR gene encoding an IscR protein having an H107Y substitution (as described in Example 1) resulting in the strain BS3327. Similarly, pBS1769 was introduced into E. coli strain BS1011 carrying a wild-type version of the iscR gene, resulting in strain BS3326.
Overnight 500 μL seed cultures of each strain (Table 17) are cultivated in parallel at 37° C. in 50 mL LB medium supplemented with 100 μg/mL ampicillin and 5 g/l of NH4(SO4) as nitrogen source at 200 rpm until the cell density reaches an OD600ₙₘ of 0.8-1.0. IPTG is then added to the medium at a concentration of 0.1 mM of each culture, together with glutamine at a range of concentrations; and the cell cultures are further incubated at 28° C. for 24-48 h. Cells from each culture are then harvested by centrifugation (17000 g, 5 min). The supernatant is collected and used for detection of extracellular aminolaevulinic acid (ALA) using an Ehrlich reagent. ALA is then quantified by spectrometric analysis at 550 nm.
The catalytic activity of GltDB, expressed in the IscR mutant E. coli strain transformed with pBS1769, is increased as compared GltDB expressed in IscR WT E. coli strain transformed with pBS1769.

### Example 9 Engineering and Characterization of Genetically Modified E. coli Strains Capable of Enhanced Pyrroloquinoline Quinone Production

[0299] 9.01 Enhanced PqqA Peptide Cyclase Activity in an IscR H107Y Mutant Strain Overexpressing a pqqA Gene.
The following strains of Escherichia coli used in the example are listed below.

TABLE 19
Strains

| Name | Description |
|---|---|
| BS1011 | ΔbioB (JW0758-1) derived from Escherichia coli K-12 BW25113 having |
| | genotype: rrnB3 ΔlacZ4787 hsdR514 Δ(araBAD)567 Δ(rhaBAD)568 rph- |
| | 1 |
| BS1353 | BS1011 derivative comprising a H107Y mutation in iscR |
| BS2629 | BS1011 transformed with pBS1259 |
| BS2630 | BS1353 transformed with pBS1259 |
| BS_PQQ1 | BS1011 transformed with pBS_pqq giving IPTG inducible PqqABCDEF |
| | expression |
| BS_PQQ2 | BS1353 transformed with pBS_pqq giving IPTG inducible PqqABCDEF |
| | expression |

The following plasmids used in the example are listed below.

TABLE 20
Plasmids

| Name | Description |
|---|---|
| pBS_PQQ | Plasmid (AmpR, p15A) comprising genes encoding PqqA [SEQ ID No.: |
| | 247], PqqB [SEQ ID No.: 248], PqqC [SEQ ID No.: 249], PqqD [SEQ ID |
| | No.: 250], PqqE [SEQ ID No.: 242] and PqqF [SEQ ID No.: 251] |
| | operably linked to a T5 LacO repressed promoter [SEQ ID No.: 37] and |
| | a rrnB terminator [SEQ ID No.: 94]. |
| pBS1259 | Control empty plasmid (AmpR, p15A) comprising a T5 LacO repressed |
| | promoter [SEQ ID No.: 37] and a rrnB terminator [SEQ ID No.: 94] but |
| | no additional open reading frame. |

IPTG-inducible operon comprising genes pqqA, pqqB, pqqc, pqqD, pqqE and pqqF genes derived from the pQQABCDEF operon of Klebsiella pneumoniae (ATCC 19606) encoding PqqABCDEF was cloned to create plasmid pBS_PQQ; and an empty plasmid pBS1259 having a p15A backbone was used as a control. The plasmid pBS_PQQ or the control pBS1259 were introduced into the E. coli host strain (BS1353) in which the native iscR gene was substituted by a mutant iscR gene encoding an IscR protein having an H107Y substitution (as described in Example 1) resulting in the strain BS_PQQ2 and BS2630, respectively. Additionally, the plasmids pBS_PQQ and pBS1259 were introduced into E. coli strain BS1011 carrying a wild-type version of the iscR gene, resulting in strains BS_PQQ1 and BS2629, respectively.

[0300] Overnight 500 uL seed cultures of each strain (Table 19) are cultivated in parallel at 37° C. in 50 ml LB medium supplemented with 1.0 nM biotin, 100 μg/mL ampicillin at 200 rpm until the cell density reaches an OD600 nm of 0.8-1.0. IPTG is then added to the medium; and the cell cultures are further incubated at 28° C. for 24-48 h. Cells from each culture are then harvested by centrifugation (17000 g, 5 min). The supernatant is collected and used for detection of extracellular PQQ is quantified via LC-MS using a 1290 Infinity series UHPLC coupled to a 6470 triple quadrupole from Agilent Technologies (Santa Clara, USA) as described by Noji, et al., 2007.

[0301] The catalytic activity of PqqA peptide cyclase activity (PqqE), expressed in the IscR mutant E. coli strain transformed with pBS_PQQ (strain BS_PQQ2), as compared with its expression in Isc WT E. coli strain transformed with pBS_PQQ (strain BS_PQQ2), or either E. coli strain transformed with the control empty plasmid or plasmids pBS_PQQ is increased, based on an increase in detected levels of PQQ produced.

### Example 10 Engineering and Characterization of Genetically Modified E. coli Strains Capable of Enhanced Nitrogenase Activity

[0302] 10.01 Enhanced Growth and Nitrogenase Activity in an IscR H107Y Mutant Strain Overexpressing nifB Gene.
The following strains of Escherichia coli used in the example are listed below.

TABLE 21
Strains

| Name | Description |
|---|---|
| BS1011 | ΔbioB (JW0758-1) derived from Escherichia coli K-12 BW25113 having |
| | genotype: rrnB3 ΔlacZ4787 hsdR514 Δ(araBAD)567 Δ(rhaBAD)568 rph-1 |
| BS1353 | BS1011 derivative comprising a H107Y mutation in iscR |
| BS2378 | BS1011 transformed with pBS1169 |
| BS2381 | BS1353 transformed with pBS1169 |
| BS2470 | BS1011 transformed with pBS1653 |
| BS2472 | BS1353 transformed with pBS1653 |
| BS2629 | BS1011 transformed with pBS1259 |
| BS2630 | BS1353 transformed with pBS1259 |
| BS2473 | BS1011 transformed with pBS1169, pBS1653 and pBS1654 |
| BS2474 | BS1353 transformed with pBS1169, pBS1653 and pBS1654 |

The following plasmids used in the example are listed below.

TABLE 22
Plasmids

| Name | Description |
|---|---|
| pBS1169 | Plasmid (AmpR, p15A) comprising genes encoding NifB [SEQ ID No.: 253] |
| | operably linked to a T5 LacO repressed promoter [SEQ ID No.: 37] and |
| | a rrnB terminator [SEQ ID No.: 94]. |
| pBS1653 | Plasmid (KanR, p15A) comprising genes encoding a NifHDKENXVHesA |
| | [SEQ ID No.: 263-270] operably linked to a a constitutive promoter [SEQ |
| | ID No.: 14] and a rrnB terminator [SEQ ID No.: 94]. |
| pBS1259 | Control empty plasmid (AmpR, p15A) comprising a T5 LacO inducible |
| | promoter [SEQ ID No.: 37], a RBS sequence [SEQ ID No.: 4], where AmpR |
| | is the sole open reading frame. |
| pBS1654 | Plasmid (CamR, pBR322) comprising genes encoding NifUSFIdA [SEQ ID |
| | No.: 33-35] and a rrnB terminator [SEQ ID No.: 94]. |

IPTG-inducible gene encoding NifB (Nitrogenase iron-molybdenum cofactor biosynthesis protein) was cloned to give plasmid pBS1169; and an empty plasmid pBS1259 having a p15A backbone was used as a control. pBS1169 or pBS1259 were introduced into the E. coli host strain (BS1353) in which the native iscR gene was substituted by a mutant iscR gene encoding an IscR protein having an H107Y substitution (as described in Example 1) resulting in the strains BS2472 and BS2630, respectively. Similarly, the plasmids pBS1169 or pBS1259 were introduced into E. coli strain BS1011 carrying a wild-type version of the iscR gene, resulting in strains BS2378 and BS2629, respectively.
Cells of strains in Table 21 were cultivated 24 h at 37° C. in parallel cultures comprising mMOPS medium (as described in Example 1.03) supplemented with 1 nmol/L biotin, 100 μg/mL ampicillin and with 0 or 1 mM IPTG in deep culture plates. Cell growth was monitored over 24 h by measuring cell density at OD₆₂₀ nm (FIG. 22). The lag-phase duration and growth rate of strains BS2580 (IscR WT) and BS2581 (IscR mutant), comprising control plasmids was similar under both non-inducing and inducing conditions (FIG. 21). However, IPTG induction of NifB transgene expression resulted in an extended lag-phase and slower growth rate for IscR WT strain BS2472, indicating that nifB-overexpression is toxic for the cells. This growth deficiency is largely overcome when the nifB gene is overexpressed in the IscR mutant strain BS2472. This demonstrates that the IscR mutant strain provides sufficient Fe—S clusters to meet the functional requirements of both over-expressed NifB protein and other native Fe—S proteins in the cell and to thereby support cell growth.
10.02 Enhanced Nitrogenase Activity and Nitrogen Fixation in an IscR H107Y Mutant Strain Overexpressing nifB, or Co-Overexpressing NifB and Additional Nitrogenase Pathway Genes
Additionally, E. coli strains having the wild type (BS1011) and mutant IscR gene (BS1353) were transformed with both pBS1169 (comprising the NifB gene) as well as pBS1653 plasmid comprising genes encoding NifHDKENXVHesA; and pBS1654 plasmid comprising genes encoding NifU, NifS and FldA. The catalytic activity of NifB expressed in the respective E. coli strains (Table 21) is determined as follows. Cells of each of the strains are cultured in mMOPS medium (as described in Example 1.03) supplemented with 1 nmol/L biotin, 100 μg/mL ampicillin at 30 degrees Celsius for 16 h, then centrifuged (4000 g for 5 min) and washed three times in 1 mL water. Cells from each culture are then re-suspended in nitrogen-deficient medium (10.4 g Na2HPO4, 3.4 g KH2PO4, 26 mg CaCl2.2H2O, 30 mg MgSO4, 0.3 mg MnSO4, 36 mg Ferric citrate, 7.6 mg Na2MoO4.2H2O, 10 μg p-aminobenzoic acid, 5 μg biotin and 4 g glucose per liter and supplemented with 2 mM glutamate as nitrogen source. An optimal IPTG concentration for nifB gene expression was added. When OD600ₙₘ 0.4 is reached, 1 ml of each culture is transferred to an oxygen isolated tube by using argon gas to fill headspace. After 8 h incubation at 30° C., the obtained cells are assayed for nitrogenase activity by incubating the cells with acetylene (10% tube headspace volume) for 3 additional hours. The incubated samples are then analysed for ethylene levels, resulting from acetylene reduction, by gas chromatography, therefore giving a measure of nitrogenase activity in the strains.
Nitrogenase activity is enhanced in the IscR mutant E. coli strain, B52472, expressing the transgene encoding nifB alone, and is further enhanced in IscR mutant E. coli strain, B52474, by co-expression of transgenes encoding NifHDKENXVHesA and NifUSFIdA, as compared to their co-expression in the parent host E. coli strain expressing wild type IscR (BS2473).

### Example 11 Engineering and Characterization of Genetically Modified E. coli Strains Capable of Enhanced Indigo Production

### 11.01 Enhanced Rieske Di-Oxygenase Activity in an IscR H107Y Mutant Strain Overexpressing a NdoBCRA Genes.

[0303] The following strains of Escherichia coli used in the example are listed below.

TABLE 23
Strains

| Name | Description |
|---|---|
| BS1011 | ΔbioB (JW0758-1) derived from Escherichia coli K-12 BW25113 having |
| | genotype: rrnB3 ΔlacZ4787 hsdR514 Δ(araBAD)567 Δ(rhaBAD)568 rph- |
| | 1 |
| BS1353 | BS1011 derivative comprising a H107Y mutation in iscR |
| BS2629 | BS1011 transformed with pBS1259 |
| BS2630 | BS1353 transformed with pBS1259 |
| BS_NdoBCRA1 | BS1011 transformed with pBS_NdoBCRA |
| BS_NdoBCRA2 | BS1353 transformed with pBS_NdoBCRA |

The following plasmids used in the example are listed below.

TABLE 24
Plasmids

| Name | Description |
|---|---|
| pBS_NdoBCRA | Plasmid (AmpR, p15A) comprising NdoB [SEQ ID No.: 3], NdoC [SEQ |
| | ID No.: 4], ], NdoA [SEQ ID No.: 4], NdoR [SEQ ID No.: 4], operably |
| | linked to a T5 LacO repressed promoter [SEQ ID No.: 37] and a rrnB |
| | terminator [SEQ ID No.: 3]. |
| pBS1259 | Control empty plasmid (AmpR, p15A) comprising a T5 LacO repressed |
| | promoter [SEQ ID No.: 37] and a rrnB terminator [SEQ ID No.: 94] but |
| | no additional open reading frame. |

IPTG-inducible operon comprising the naphthalene dioxygenase NdoBC and reductase NdoRA genes derived from the Pseudomonas putida were cloned to create plasmid pBS_NdoBCRA; and an empty plasmid pBS1259 having a p15A backbone was used as a control. The plasmid pBS_NdoBCRA and the control plasmid pBS1259 were introduced into the E. coli host strain (BS1353) in which the native iscR gene was substituted by a mutant iscR gene encoding an IscR protein having an H107Y substitution (as described in Example 1) resulting in the strain BS_NdoBCRA2 and BS2630, respectively. Additionally, the plasmids pBS_NdoBCRA and pBS1259 were introduced into E. coli strain BS1011 carrying a wild-type version of the iscR gene, resulting in strains BS_NdoBCRA1 and BS2629, respectively.
Overnight 500 uL seed cultures of each strain (Table 19) are cultivated in parallel at 37° C. in 50 mL LB medium supplemented with 1.0 nM biotin and 100 μg/mL ampicillin, at 200 rpm until the cell density reaches an OD600ₙₘ of 0.6. IPTG (0.5 mM) is then added to the medium; and the cell cultures are further incubated at 27° C. for 24-48 h. The cells are then harvested, mixed with an equal volume of N,N dimethylformamide to solubilize and extract the indigo, and following centrifugation to remove biomass, the absorbance of the extract is read at OD₆₂₀. Indigo concentrations are calculated by comparison to a standard curve constructed using synthetic indigo.
The catalytic activity of the naphthalene dioxygenase NdoBC and reductase NdoRA complex expressed in the IscR mutant E. coli strain transformed with pBS_NdoBCRA (strain BS_NdoBCRA2), as compared with its expression in Isc WT E. coli strain transformed with pBS_NdoBCRA (strain BS_NdoBCRA1), or either E. coli strain transformed with the control empty plasmid is increased, based on an Increase in detected levels of Indigo pigment produced.

### REFERENCES

[0304] Datsenko K A, Wanner B L (2000) One-step inactivation of chromosomal genes in Escherichia coli K-12 using PCR products. Proc Natl Acad Sci USA.; 97(12):6640-5.
[0305] Fleischhacker, A. S. et al. (2012) Characterization of the [2Fe-2S] cluster of Escherichia coli transcription factor IscR. Biochemistry 51: 4453-4462.
[0306] Giel, J. L, Rodionov, D., Liu, M., Blattner, F. R. & Kiley, P. J. (2006) IscR-dependent gene expression links iron-sulphur cluster assembly to the control of O2-regulated genes in Escherichia coli. Mol. Microbiol. 60, 1058-1075.
[0307] Herbert A A, Guest J R. (1975) Lipoic acid content of Escherichia coli and other microorganisms. Arch Microbiol.; 106(3):259-66. Epub 1975/12/31. pmid:814874
[0308] Ifuku, O. et al. Sequencing analysis of mutation points in the biotin operon of biotin-overproducing Escherichia coli mutants. Biosci Biotechnol Biochem 57, 760-765 (1993).
[0309] Ifuku, O. et al., (1995) “Molecular analysis of growth inhibition caused by overexpression of the biotin operon in Escherichia coli.” Bioscience, biotechnology, and biochemistry 59(2):184-189.
[0310] Mutalik et al., (2013) Precise and reliable gene expression via standard transcription and translation initiation elements Nature methods VOL.10(4) 354.
[0311] Noji, N., Nakamura, T., Kitahata, N., Taguchi, K., Kudo, T., Yoshida, S., Asami, T. (2007). Simple and Sensitive Method for Pyrroloquinoline Quinone (PQQ) Analysis in Various Foods Using Liquid Chromatography/Electrospray-Ionization Tandem Mass Spectrometry. Journal of Agricultural and Food Chemistry, 55(18), 7258-7263. https://doi.org/10.1021/jf070483r
[0312] Ollagnier-de Choudens et. al. (2005) Quinolinate synthetase, an iron-Sulphur enzyme in NAD biosynthesis. FEBS Letters 579 3737-3743
[0313] Py, B. & Barras, F. (2010) Building Fe—S proteins: bacterial strategies. Nat. Rev. Microbiol. 8, 436-446.
[0314] Schmitt, A, Kochanowski K., Vedelaar S., Ahrnk E., Volkmer B., Callipo L, Knoops K., Bauer M., Aebersold R., & Heinemann M., (2015) The quantitative and condition-dependent Escherichia coli proteome. Nature Biotechnology 2015; doi:10.1038
[0315] Zhou K, Zou R, Stephanopoulos G, Too H-P (2012) Metabolite Profiling Identified Methylerythritol Cyclodiphosphate Efflux as a Limiting Step in Microbial Isoprenoid Production. PLoS ONE 7(11): e47513. doi:10.1371/journal.pone.0047513

1. A genetically modified prokaryotic cell comprising:
a) a transgene or a genetically modified iscR gene encoding a mutant IscR polypeptide; and
b) transgenes or endogenous genes encoding at least one Fe—S cluster polypeptide, wherein the at least one FE—S cluster polypeptide is not any one of i. biotin synthase (EC: 2.8.1.6), ii. lipoic acid synthase (EC: 2.8.1.8), iii. HMP-P synthase (EC: 4.1.99.17), and vi. tyrosine lyase (EC: 4.1.99.19); and
wherein the endogenous genes are operably linked to genetically modified regulatory sequences capable of enhancing expression of said endogenous genes, and wherein the mutant IscR polypeptide as compared to a corresponding non-mutant IscR polypeptide has an increased apoprotein:holoprotein ratio in the cell; and wherein the production of at least one compound resulting from the catalytic activity of the at least one Fe—S cluster polypeptide is enhanced when compared to a prokaryotic cell comprising the genetically unmodified iscR gene and the transgenes or the endogenous genes encoding at least one Fe—S polypeptide.

2. The cell of claim 1, wherein the amino acid sequence of said mutant IscR polypeptide has at least 80% amino acid sequence identity to a sequence selected from the group consisting of SEQ ID No: 2, 4, 6, 8, 10, 12, 14, and 15-26, and wherein said amino acid sequence has at least one amino acid substitution selected from the group consisting of L15X, C92X, C98X, C104X, and H107X; wherein X is any amino acid other than the corresponding amino acid residue in SEQ ID No.: 2, 4, 6, 8, 10, 12, 14, and 15-26.

3. The cell of claim 2, wherein said at least one amino acid substitution in said mutant IscR polypeptide is selected from the group consisting of:
a) L15X, wherein X is any one of F, Y, M and W;
b) C92X, wherein X is any one of Y, A, M, F and W;
c) C98X, wherein X is any one of A, V, I, L, F and W;
d) C104X, wherein X is any one of A V, I, L, F and W; and
e) H107X; wherein X, is any one of A, Y, V, I, and L.

4. The cell of claim 1, wherein said at least one Fe—S cluster polypeptide is selected from the group consisting of: Oxygen-independent coproporphyrinogen III oxidase (EC:1.3.98.3); Quinolate synthase (EC:2.5.1.72); Precorrin-3B synthase (EC:1.14.13.83); Dihydroxy-acid dehydratase (EC:4.2.1.9); 4-hydroxy-3-methylbut-2-en-1-yl diphosphate synthase (EC:1.17.7.3); 4-hydroxy-3-methylbut-2-enyl diphosphate reductase (EC:1.17.7.4); glutamate synthase [NADPH] large chain (EC:1.4.1.13); Glutamate synthase [NADPH] small chain (EC:1.4.1.13); PqqA peptide cyclase (EC:1.21.98.4); Nitrogenase FeMo cofactor biosynthesis protein (EC:-.-.-.-); Naphthalene 1,2-dioxygenase system, large oxygenase component (EC:1.14.12.12); Naphthalene 1,2-dioxygenase system, small oxygenase component (EC:1.14.12.12); Naphthalene 1,2-dioxygenase system, ferredoxin component (EC:1.18.1.7); Naphthalene 1,2-dioxygenase system reductase component (EC:1.18.1.7); NADH-ubiquinone oxidoreductase subunit E (EC: 1.6.5.3); NADH-ubiquinone oxidoreductase chain E (EC:1.6.5.3; 1.6.99.5); Limonene hydroxylase (EC:1.1.1.144; 1.1.1.243; 1.14.13.49); Tetrachlorobenzoquinone (EC:1.1.1.404); Formate dehydrogenase molybdopterin-binding subunit FdhA); (EC:1.1.5.6); Formate dehydrogenase major subunit (EC:1.2.1.2); Formate dehydrogenase H (EC:1.1.99.33); Quinone-reactive Ni/Fe hydrogenase small subunit (HydA)(EC:1.12.1.2); Sulfur reductase subunit (HydB)(EC:1.12.98.4); Mevastatin hydroxylase (EC:1.14.-.-); Anthranilate 1,2-dioxygenase large subunit (EC:1.14.12.1); Benzoate 1,2-dioxygenase subunit alpha (EC:1.14.12.10); Biphenyl dioxygenase subunit alpha (EC:1.14.12.18); 3-phenylpropionate/cinnamic acid dioxygenase (EC:1.14.12.19); Carbazole 1,9-dioxygenase (EC:1.14.12.22); p-cumate 2,3-dioxygenase system (EC:1.14.12.25); Benzene and toluene dioxygenase (EC:1.14.12.3; 1.14.12.11); Methylxanthine N3-demethylase (EC:1.14.13.179); Carnitine monooxygenase oxygenase subunit (EC:1.14.13.239); Methane monooxygenase component C (EC:1.14.13.25); Limonene hydroxylase (EC:1.14.13.48); Phenol hydroxylase (EC:1.14.13.7); Methyl-branched lipid omega-hydroxylase (EC:1.14.15.14); Chloroacetanilide N-alkylformylase (EC:1.14.15.23); Steroid monooxygenase (EC:1.14.15.28); Steroid monooxygenase (EC:1.14.15.29); 3-ketosteroid-9-alpha-monooxygenase (EC:1.14.15.30); Pentalenene oxygenase (EC:1.14.15.32); 6-deoxyerythronolide B hydroxylase (EC:1.14.15.35); Spheroidene monooxygenase (EC:1.14.15.9); Biflaviolin synthase CYP158A2 (EC:1.14.19.69); Mycocyclosin synthase (EC:1.14.19.70); 4-hydroxy-3-methylbut-2-en-1-yl diphosphate synthase (EC:1.17.7.1); Carbazole 1,9a-dioxygenase (EC:1.18.1.3); Cinnamate reductase (EC:1.3.1.-); 8-methylmenaquinol:fumarate reductase iron-sulfur subunit (EC:1.3.5.-); Probable iron-sulfur-binding oxidoreductase FadF (EC:1.3.8.7); CRISPR-associated exonuclease Cas4/endonuclease Cas1 fusion (EC:3.1.12.1); 4-hydroxyphenylacetate decarboxylase small subunit (EC:4.1.1.83); Cyclic pyranopterin monophosphate synthase (EC:4.1.99.18); 5-hydroxybenzimidazole synthase (EC:4.1.99.23); 2-methylcitrate dehydratase (EC:4.2.1.117); Fumarate hydratase class I, anaerobic (EC:4.2.1.2; 4.2.1.81); Fumarate hydratase class I, aerobic (EC:4.2.1.2; 5.3.2.2); Aconitate hydratase A (EC:4.2.1.3); L (+)-tartrate dehydratase subunit alpha (EC:4.2.1.32); 3-isopropylmalate dehydratase large subunit (EC:4.2.1.33); Isopropylmalate/citramalate isomerase large subunit (EC:4.2.1.35; 4.2.1.31); L-serine dehydratase (EC:4.3.1.17); L-cysteine desulfidase (EC:4.4.1.28); Neomycin C epimerase (EC:5.1.3.-); L-lysine 2,3-aminomutase (EC:5.4.3.-); 3-methylornithine synthase (Pyrrolysine)(EC:5.4.99.58); Xanthine dehydrogenase (EC:1.2.99.7; 1.3.7.9); Zeaxanthin epoxidase (EC:1.14.15.21); Xanthine dehydrogenase/oxidase (EC:1.17.1.4; 1.17.3.2); Vitamin D3 hydroxylase (EC:1.14.15.16); Vitamin D3 hydroxylase (EC:1.14.15.18); Vitamin D3 dihydroxylase (EC:1.14.15.22); Vanillate 0-demethylase oxygenase (EC:1.14.13.82); Terephthalate 1,2-dioxygenase (EC:1.14.12.15); Salicylate 5-hydroxylas (EC:1.14.13.172); Cytochrome b-cl complex subunit Rieske-5 (EC:1.10.2.2); Cytochrome P450 monooxygenase PikC (EC:1.14.15.33); Phthalate 4,5-dioxygenase oxygenase subunit (EC:1.14.12.7); Phenoxybenzoate dioxygenase (EC:1.14.12.-); Nicotinate dehydrogenase small FeS subunit (EC:1.17.1.5); Methanesulfonate monooxygenase hydroxylase (EC:1.14.13.111); 6-hydroxynicotinate reductase (EC:1.3.7.1); Dimethyl sulfoxide reductase (EC:1.8.5.3); Vitamin D3 25-hydroxylase (EC:1.14.15.15); 2-halobenzoate 1,2-dioxygenase large subunit (EC:1.14.12.13); Camphor 5-monooxygenase (EC:1.14.15.1); Putidaredoxin reductase CamA (Pdr) (EC:1.18.1.5); Methylxanthine N1-demethylase NdmA (EC:1.14.13.178); Butirosin biosynthesis protein N (EC:1.1.99.38); Beta-carotene hydroxylase (EC:1.14.15.24); 2-amino-4-deoxychorismate dehydrogenase (EC:1.3.99.24); Aminodeoxyfutalosine synthase (EC:2.5.1.120); hopanoid C-3 methylase (EC:2.1.1.-); aminofutalosine synthase (cofactor biosynthesis-menaquinone via futalosine)(EC:2.5.1.120); FO synthase, CofH subunit (cofactor biosynthesis-F420)(EC:2.5.1.147); GTP 3′,8-cyclase (molybdenum cofactor)(EC:4.1.99.22); FO synthase, CofG subunit (cofactor biosynthesis-F420)(EC:4.3.1.32); and 7-carboxy-7-deazaguanine (CDG) synthase (EC:4.3.99.3).

5. The cell of claim 1, wherein the at least one Fe—S cluster polypeptide has oxygen-independent coproporphyrinogen III oxidase synthase (EC: 1.3.98.3) activity, and wherein said cell comprises additional transgenes or additional endogenous genes operably linked to genetically modified regulatory sequences capable of enhancing expression of said endogenous genes, wherein said additional transgenes or endogenous genes encode one or more polypeptides selected from the group consisting of:
a) a HemA polypeptide having glutamyl-tRNA reductase activity (EC: 1.2.1.70) activity;
b) a HemL polypeptide having glutamate-1-semialdehyde 2,1-aminomutase activity (EC: 5.4.3.8) activity;
c) a HemB polypeptide having delta-aminolevulinic acid dehydratase activity (EC: 4.2.1.24) activity;
d) a HemC polypeptide having porphobilinogen deaminase activity (EC: 2.5.1.61) activity;
e) a HemD polypeptide having Uroporphyrinogen III methyltransferase activity (EC: 4.2.1.75);
f) a HemE polypeptide having uroporphyrinogen decarboxylase activity (EC: 4.1.1.37);
g) a HemZ polypeptide having an Oxygen-independent coproporphyrinogen-III oxidase activity (EC: 1.3.98.3);
h) a HemG polypeptide having protoporphyrinogen IX dehydrogenase (menaquinone) activity (EC: 1.3.5.3); and
i) a HemH polypeptide having protoporphyrin ferrochelatase activity (EC: 4.99.1.1).

6. The cell of claim 5, wherein said cell comprises additional transgenes or additional endogenous genes operably linked to genetically modified regulatory sequences capable of enhancing expression of said endogenous genes, wherein said additional transgenes or endogenous genes encode one or more polypeptides selected from the group consisting of: myoglobin, hemoglobin, neuroglobin, cytoglobin and leghemoglobin, protoheme IX, siroheme, chlorophylls, cofactor F430, B12, cytochrome P450 monooxygenase (EC: 1.14.-.-), peroxidase (EC: 1.11.1.-), perooxygenase (EC: 1.11.2.-), catechol oxidase (EC: 1.10.3.-), hydroperoxide dehydratase (EC: 4.2.1.-), tryptophan 2,3-dioxygenase (EC: 1.13.11.-), and cytochrome c oxidase (EC: 1.9.3.-).

7. The cell of claim 1, wherein the at least one Fe—S cluster polypeptide has NadA quinolate synthase activity (EC: 2.5.1.72), and wherein said cell comprises additional transgenes or additional endogenous genes operably linked to genetically modified regulatory sequences capable of enhancing expression of said endogenous genes, wherein said additional transgenes or endogenous genes encode one or more polypeptides selected from the group consisting of:
a) a NadB polypeptide having aspartate oxidase activity (synthesizes iminoaspartate from L-aspartate (EC: 1.4.3.16);
b) a NadC polypeptide having Nicotinate-nucleotide pyrophosphorylase activity (EC: 2.4.2.19);
c) a NadD polypeptide having Nicotinate-nucleotide adenylyltransferase activity (EC: 2.7.7.18);
d) a NadE polypeptide having NH(3)-dependent NAD(+) synthetase activity (EC: 6.3.1.5);
e) a NudC polypeptide having NADH pyrophospahatase activity (EC: 3.6.1.22);
f) an AphA polypeptide having phosphatase activity (EC: 3.1.3.2);
g) a NadE* polypeptide having nicotinic acid mononucleotide amidating activity;
h) a chi polypeptide having NMN nucleosidase activity (EC: 3.2.2.14); and
i) a pncA polypeptide having nicotinamide deamidase activity (EC: 3.5.1.19).

8. The cell of claim 1, wherein the at least one Fe—S cluster polypeptide is a CobG polypeptide having precorrin-3B synthase (EC: 1.3.98.3), and wherein said cell comprises additional transgenes or additional endogenous genes operably linked to genetically modified regulatory sequences capable of enhancing expression of said endogenous genes, wherein said additional transgenes or endogenous genes encode one or more polypeptides selected from the group consisting of:
a) a CobA polypeptide having uroporphyrinogen-III C-methyltransferase activity (EC: 2.1.1.107);
b) a CobI polypeptide having precorrin-2 C20-methyltransferase activity (EC: 2.1.1.130);
c) a CobM polypeptide having precorrin-3 methylase activity (EC: 2.1.1.133);
d) a CobF polypeptide having cobalt-precorrin-6A synthase activity (EC: 2.1.1.195);
e) a CobK polypeptide having precorrin-6A reductase activity (EC: 1.3.1.54);
f) a CobH polypeptide having precorrin isomerase activity (EC: 5.4.99.61);
g) a CobL polypeptide having precorrin-6Y C(5,15)-methyltransferase activity (EC: 2.1.1.132);
h) a CobJ polypeptide having precorrin-3B C(17)-methyltransferase (EC: 2.1.1.131);
i) a CobB polypeptide having Hydrogenobyrinate a,c-diamide synthase activity (EC: 6.3.5.9);
j) a CobNST polypeptide having Cobaltochelatase activity (EC: 6.6.1.2);
k) a CobO polypeptide having Corrinoid adenosyltransferase activity (EC: 2.5.1.17);
l) a CobQ polypeptide having Cobyrinate a,c-diamide synthase activity (EC: 6.3.5.11);
m) a CbiB polypeptide A CobU polypeptide having Adenosylcobinamide kinase activity (EC: 2.7.1.156) and adenosylcobinamide-phosphate guanylyltransferase activity (EC: 2.7.7.62);
n) a CobC polypeptide having Adenosylcobalamin phosphatase activity (EC: 3.1.3.73);
o) a PduX polypeptide having L-threonine kinase activity (EC: 2.7.1.177);
p) a CobD polypeptide having Threonine-phosphate decarboxylase activity (EC: 4.1.1.81);
q) a CobT polypeptide having dimethylbenzimidazole phosphoribosyltransferase activity (EC: 2.4.2.21);
r) a BtuR polypeptide having corrinoid adenosyltransferase activity (EC: 2.5.1.17);
s) a CbiO polypeptide having cobalt import ATP-binding protein activity (EC: 3.6.3.-);
t) a CbiN polypeptide having the function of a cobalt transport protein;
u) a CbiQ polypeptide having the function of a cobalt transport protein; and
v) a CbiM polypeptide having the function of a cobalt transport protein.

9. The cell of claim 1, wherein the at least one Fe—S cluster polypeptide is an IlvD polypeptide having dihydroxy-acid dehydratase activity (EC: 4.2.1.9), and wherein said cell comprises additional transgenes or additional endogenous genes operably linked to genetically modified regulatory sequences capable of enhancing expression of said endogenous genes,
wherein said additional transgenes or endogenous genes encode one or more polypeptides selected from the group consisting of:
a) an IlvB large subunit polypeptide and an IlvN small subunit having acetolactate synthase isozyme 1 activity (EC: 2.2.1.6);
b) an IlvC polypeptide having ketol-acid reductoisomerase (NADP+) activity (EC: 1.1.1.86); and
c) an IlvE branched-chain-amino-acid aminotransferase activity (EC: 2.6.1.42).

10. The cell of claim 1, wherein the at least one Fe—S cluster polypeptide is an IspG polypeptide having 4-hydroxy-3-methylbut-2-en-1-yl diphosphate synthase (EC: 1.17.7.3) and/or an IspH polypeptide having 4-hydroxy-3-methylbut-2-enyl diphosphate reductase activity (EC: 1.17.7.4), wherein said cell comprises additional transgenes or additional endogenous genes operably linked to genetically modified regulatory sequences capable of enhancing expression of said endogenous genes,
wherein said additional transgenes or endogenous genes encode:
a) a DXS polypeptide having 1-deoxy-D-xylulose-5-phosphate synthase activity (EC: 2.2.1.7);
b) an IspC polypeptide having 1-deoxy-D-xylulose 5-phosphate reductoisomerase activity (EC: 1.1.1.267);
c) an IspE polypeptide having 4-diphosphocytidyl-2-C-methyl-D-erythritol kinase activity (EC: 2.7.1.148);
d) an IspD polypeptide having 2-C-methyl-D-erythritol 4-phosphate cytidylyltransferase activity (EC: 2.7.7.60);
e) an IspF polypeptide having 2-C-methyl-D-erythritol 2,4-cyclodiphosphate synthase (EC: 4.6.1.12);
f) an IpI polypeptide having isopentenyl-diphosphate Delta-isomerase activity (EC: 5.3.3.2); and
g) a RpoS polypeptide having the function of a RNA polymerase subunit sigma factor σ.

11. The cell of claim 1, wherein the at least one Fe—S cluster polypeptide is a large chain GltB polypeptide and a small chain GltD polypeptide having glutamate synthase [NADPH] activity (EC: 1.4.1.13).

12. The cell of claim 11, wherein said cell comprises additional transgenes or additional endogenous genes operably linked to genetically modified regulatory sequences capable of enhancing expression of said endogenous genes, wherein said additional transgenes or endogenous genes encode one or more polypeptides selected from the group consisting of:
a) a GltX polypeptide having glutamyl-tRNA synthetase activity, (EC: 6.1.1.17);
b) a HemA polypeptide having glutamyl-tRNA reductase activity, (EC: 1.2.1.70); and
c) a HemL polypeptide having Glutamate-1-semialdehyde 2,1-aminomutase activity, (EC: 5.4.3.8).

13. The cell of claim 1, wherein the at least one Fe—S cluster polypeptide is a PqqE polypeptide having PqqA peptide cyclase activity (EC: 1.21.98.4), wherein said cell comprises additional transgenes or additional endogenous genes operably linked to genetically modified regulatory sequences capable of enhancing expression of said endogenous gene,
wherein said additional transgenes or endogenous genes encode one or more polypeptides selected from the group consisting of:
a) a PqqA polypeptide;
b) a PqqB polypeptide having a PQQ carrier function,
c) a PqqC polypeptide having Pyrroloquinoline-quinone synthase activity (EC: 1.3.3.11),
d) a PqqD polypeptide having PqqA binding activity; and
e) A PqqF polypeptide having metalloendopeptidase (EC: 3.4.24.-).

14. The cell of claim 1, wherein the at least one Fe—S cluster polypeptide is a NifB polypeptide having nitrogenase FeMo cofactor biosynthesis activity, wherein said cell comprises additional transgenes or additional endogenous genes operably linked to genetically modified regulatory sequences capable of enhancing expression of said endogenous genes,
wherein said additional transgenes or endogenous genes encode one or more polypeptides selected from the group consisting of:
a) a NifD polypeptide having nitrogenase protein alpha chain activity (EC: 1.18.6.1)
b) a NifH polypeptide having nitrogenase iron protein (EC: 1.18.6.1) activity;
c) a NifK polypeptide having nitrogenase molybdenum-iron protein beta chain (EC: 1.18.6.1) activity;
d) a NifE polypeptide having Fe—Mo co-factor biosynthesis activity;
e) a NifN polypeptide having Fe—Mo co-factor biosynthesis activity;
f) a NifX polypeptide having nitrogen fixation protein activity;
g) a HesA polypeptide; and
h) a NifV polypeptide having an isocitrate synthase activity (EC: 2.3.3.14).

15. The cell of claim 14, wherein said additional transgenes or endogenous genes further encode one or more polypeptides selected from the group consisting of:
a) a gene encoding a flavodoxin/ferredoxin-NADP reductase (EC: 1.18.1.2 and EC 1.19.1.1);
b) a gene encoding a pyruvate-flavodoxin/ferredoxin oxidoreductase (EC: 1.2.7);
c) a gene encoding a flavodoxin;
d) a gene encoding a ferredoxin; and
e) a gene encoding a flavodoxin and a ferredoxin-NADP reductase; and
wherein said endogenous genes are operably linked genetically modified regulatory sequences capable of enhancing expression of said endogenous genes in said cell.

16. The cell of claim 1, wherein said prokaryotic cell is a genus of bacterium selected from the group consisting of Escherichia, Bacillus, Brevibacterium, Burkholderia, Campylobacter, Corynebacterium, Pseudomonas, Serratia, Lactobacillus, Lactococcus, Acinetobacter, Pseudomonas, Acetobacter, Rhizobium, Frankia, and Azospirillum.

17. The cell of claim 1, wherein said at least one compound resulting from the catalytic activity of the at least one Fe—S cluster polypeptide is selected from the group consisting of 2-keto-isovalerate, 2-keto-3-methyl-valerate, 3-methyl-2-oxobutanoate, 3-methyl-2-oxopentanoate, ammonia, Anthranilate, Benzene, Benzoquinone, beta-carotenes, Beta-lysines, Bioflaviolin, Biphenyls, Butirosin, Caffeine, Camphor, Carbazole, Carnitine, Catechol, Chloroacetanilide, Cinnamic acid, cobalamin, Cofactor F420, cytochrome P450 monooxygenase, Dimethyl sulfoxide, Erythromycin, Flavodoxin/ferredoxin, Fumarate, Futalosin, Glutamate, GTP, Guanine, Heme, Hopanoid, hydrogen, Hydrogenase, hydrogen, Hydroxybenzoimidazole, Hydroxynicotinate, Iisocitrate, Indigo, isobutanol, Isocitrate, isoprenoid, isopropanol, Isopropyl malate, Isopropyl malate, Ketoisovalerate, branched chain amino acids, pantothenate, butanol), L-cysteine, L-Glutamate, L-glutamate, Limonene, L-isoleucine, L-leucine, Long-chain (2E)-enoyl-CoA, L-valine, Menaquinol, Terpenoids, Methanesulfonate, Methanol, methoxatinpyrroloquinoline, Methyl-branched lipids, Methyl-ornithine, Methylphenol, Methylxanthine, Mevastatin, Mycolysin, Neomycin, niacin, nicotinamide adenine dinucleotide, nicotinamide mononucleotide, nicotinamide riboside, nicotinamide, Nicotinate, Nitrogen, Nitrogen fixation pathway, Oxaloactetate, pantothenate, p-cumeate, pentalenene, Phenoxybenzoate, Phthalate, Pikromycin, Porphyrins, Pyranopterin, Pyrroloquinoline quinone (PQQ), Quinolate, quinone, quinoprotein, Rieske iron di-oxygenase, Salicylate, Serine, Spheroidene, Steroids, Terephtalate, Toluene, Vanilin, vitamin B3, Vitamin D, Xanthine, and δ-aminolevulinic acid.

18. The cell of claim 1, wherein said at least one compound resulting from the catalytic activity of the at least one Fe—S cluster polypeptide is selected from the group consisting of: Rieske iron di-oxygenase, 3-methyl-2-oxobutanoate, 3-methyl-2-oxopentanoate, cytochrome P450 monooxygenase, vitamin B3, quinolate, niacin, nicotinamide, nicotinamide riboside, nicotinamide mononucleotide, nicotinamide adenine dinucleotide, nicotinic acid (NA), pantothenate, cobalamin, methoxatinpyrroloquinoline quinone, quinoprotein, isobutanol, isopropanol, L-valine, L-leucine, L-isoleucine, L-glutamate, δ-aminolevulinic acid, isoprenoid, hydrogen, ammonia, branched chain amino acids, Pyrroloquinoline quinone (PQQ), heme and indigo.

19. The cell of claim 1, wherein said at least one compound resulting from the catalytic activity of the at least one Fe—S cluster polypeptide is selected from group of: Heme, nicotinamide riboside, cobalamin, 3-methyl-2-oxobutanoate, 3-methyl-2-oxopentanoate, isoprenoids, L-glutamic acid, pyrroloquinoline quinone, and indigo.

20. A method for producing a compound resulting from catalytic activity of a Fe—S cluster polypeptide, comprising the steps of:
a) introducing a genetically modified prokaryotic cell into a growth medium to produce a culture;
b) cultivating the culture; and
c) recovering said compound produced by said culture, and optionally purifying the recovered compound.

21. The method of claim 20, further comprising at least one step of producing the compound which is performed in vitro.

22. A fermentation liquid comprising the cell culture of claim 20, and its contents of a compound resulting from catalytic activity of the Fe—S cluster protein.

23. A composition comprising the fermentation liquid of claim 22, and one or more agents, additives and/or excipients.

24. Use of a genetically modified gene encoding a mutant iscR polypeptide to increase production of at least one compound resulting from the catalytic activity of at least one Fe—S cluster polypeptide in a genetically modified prokaryotic cell as compared to a prokaryotic cell comprising the genetically unmodified iscR gene, wherein said Fe—S cluster polypeptide is not any one of biotin synthase (EC: 2.8.1.6), lipoic acid synthase (EC: 2.8.1.8), HMP-P synthase (EC: 4.1.99.17), and tyrosine lyase (EC: 4.1.99.19), wherein the mutant IscR polypeptide as compared to a non-mutant IscR polypeptide has an increased apoprotein:holoprotein ratio in the cell.

25. The use according to claim 24, wherein the amino acid sequence of said mutant IscR polypeptide has at least 80% amino acid sequence identity to a sequence selected from the group consisting of SEQ ID No: 2, 4, 6, 8, 10, 12, 14, and 15-26, and wherein said amino acid sequence has at least one amino acid substitution selected from the group consisting of L15X, C92X, C98X, C104X, and H107X; wherein X is any amino acid other than the corresponding amino acid residue in SEQ ID No.: 2, 4, 6, 8, 10, 12, 14 and 15-26.

26. The use according to claim 25, wherein said at least one amino acid substitution in said mutant IscR polypeptide is selected from the group consisting of:
a) L15X, wherein X is any one of F, Y, M and W;
b) C92X, wherein X is any one of Y, A, M, F and W;
c) C98X, wherein X is any one of A, V, I, L, F and W;
d) C104X, wherein X is any one of A V, I, L, F and W; and
e) H107X; wherein X, is any one of A, Y, V, I, and L.

27. Use of the at least one compound of claim 24, as any one of a dietary supplement, pharmaceutical, chemical building block, pharmaceutical or fertilizer, wherein the compound is selected from the group consisting of: Rieske iron di-oxygenase, cytochrome P450 monooxygenase, vitamin B3, niacin, nicotinamide, nicotinamide riboside, nicotinamide mononucleotide, nicotinamide adenine dinucleotide, pantothenate, cobalamin, methoxatinpyrroloquinoline quinone, quinoprotein, isobutanol, isopropanol, L-valine, L-leucine, L-isoleucine, L-glutamate, δ-aminolevulinic acid, isoprenoid, hydrogen, ammonia and indigo.

28. Use of the at least one compound of claim 24, as any one of a dietary supplement, pharmaceutical, chemical building block, pharmaceutical or fertilizer, wherein the compound is selected from the group consisting of: heme, nicotinamide riboside, cobalamin, 3-methyl-2-oxobutanoate, 3-methyl-2-oxopentanoate, isoprenoids, L-glutamic acid, pyrroloquinoline quinone, and indigo.

The application's sequence listing, which the Patent Office published only in electronic form, follows.

SEQUENCE LISTING (286 sequences)

SEQ ID NO: 1 - DNA, 489 bp, Escherichia coli
  CDS (1)..(489): iscR WT gene encoding Iron Sulfur Cluster Regulator protein (IscR)
atgagactgacatctaaagggcgctatgccgtgaccgcaatgcttgacgttgcgctcaactctgaagcgggcccggtaccgttggctgatatttccgaacgtcagggaatttccctttcttatctggaacaactgttttcccgtctgcgtaaaaatggtctggtttccagcgtacgtggaccaggcggtggttatctgttaggcaaagatgccagcagcatcgccgttggcgaagtaattagcgccgttgacgaatctgtagatgccacccgttgtcagggtaaaggcggctgccagggcggcgataaatgcctgacccacgcgctgtggcgtgatttgagcgaccgtctcaccggttttctcaacaacattactttaggcgaactggttaataaccaggaagtgctggatgtgtctggtcgtcagcatactcacgacgcgccacgcacccgcacacaagacgcgatcgacgttaagttacgcgcttaa

SEQ ID NO: 2 - protein, 162 aa, Escherichia coli
MRLTSKGRYAVTAMLDVALNSEAGPVPLADISERQGISLSYLEQLFSRLRKNGLVSSVRGPGGGYLLGKDASSIAVGEVISAVDESVDATRCQGKGGCQGGDKCLTHALWRDLSDRLTGFLNNITLGELVNNQEVLDVSGRQHTHDAPRTRTQDAIDVKLRA

SEQ ID NO: 3 - DNA, 486 bp, Shigella sonnei
  CDS (1)..(486): iscR gene encoding Iron Sulfur Cluster Regulator
atgcgcctgaccagcaaaggccgctatgcggtgaccgcgatgctggatgtggcgctgaacagcgaagcgggcccggtgccgctggcggatattagcgaacgccagggcattagcctgagctatctggaacagctgtttagccgcctgcgcaaaaacggcctggtgagcagcgtgcgcggcccgggcggcggctatctgctgggcaaagatgcgagcagcattgcggtgggcgaagtgattagcgcggtggatgaaagcgtggatgcgacccgctgccagggcaaaggcggctgccagggcggcgataaatgcctgacccatgcgctgtggcgcgatctgagcgatcgcctgaccggctttctgaacaacattaccctgggcgaactggtgaacaaccaggaagtgctggatgtgagcggccgccagcatacccatgatgcgccgcgcacccgcattctggatgcgattgatgtgaaactgcgcgcg

SEQ ID NO: 4 - protein, 162 aa, Shigella sonnei
MRLTSKGRYAVTAMLDVALNSEAGPVPLADISERQGISLSYLEQLFSRLRKNGLVSSVRGPGGGYLLGKDASSIAVGEVISAVDESVDATRCQGKGGCQGGDKCLTHALWRDLSDRLTGFLNNITLGELVNNQEVLDVSGRQHTHDAPRTRILDAIDVKLRA

SEQ ID NO: 5 - DNA, 489 bp, Citrobacter pasteurii
  CDS (1)..(489): iscR gene encoding Iron Sulfur Cluster Regulator
atgcgcctgaccagcaaaggccgctatgcggtgaccgcgatgctggatgtggcgctgaacagcgaaaccggcccggtgccgctggcggatattagcgaacgccagggcattagcctgagctatctggaacagctgtttagccgcctgcgcaaaaacggcctggtgagcagcgtgcgcggcccgggcggcggctatctgctgggcaaagatgcgagcagcattgcggtgggcgaagtgattagcgcggtggatgaaagcgtggatgcgacccgctgccagggcaaaggcggctgccagggcggcgataaatgcctgacccatgcgctgtggcgcgatctgagcgatcgcctgaccggctttctgaacaacattaccctgggcgaactggtgaacaaccaggaagtgctggatgtgagcggccgccagcatacccatgatgcgccgcgcaccaaccgcgcgcaggatgcgattgatgtgaaactgcgcgcg

SEQ ID NO: 6 - protein, 163 aa, Citrobacter pasteurii
MRLTSKGRYAVTAMLDVALNSETGPVPLADISERQGISLSYLEQLFSRLRKNGLVSSVRGPGGGYLLGKDASSIAVGEVISAVDESVDATRCQGKGGCQGGDKCLTHALWRDLSDRLTGFLNNITLGELVNNQEVLDVSGRQHTHDAPRTNRAQDAIDVKLRA

SEQ ID NO: 7 - DNA, 489 bp, Enterobacter timonensis
  CDS (1)..(489): iscR gene encoding Iron Sulfur Cluster Regulator
atgcgcctgaccagcaaaggccgctatgcggtgaccgcgatgctggatgtggcgctgaacagcgaagcgggcccggtgccgctggcggatattagcgaacgccagggcattagcctgagctatctggaacagctgtttagccgcctgcgcaaaaacggcctggtgagcagcgtgcgcggcccgggcggcggctatctgctgggcaaagatgcgggcagcattgcggtgggcgaagtgattagcgcggtggatgaaagcgtggatgcgacccgctgccagggcaaaggcggctgccagggcggcgataaatgcctgacccatgcgctgtggcgcgatctgagcgatcgcctgaccggctttctgaacaacattaccctgggcgaactggtgaacaaccaggaagtgctggatgtgagcggccgccagcatagccatgatagccagcgcaacacccgcgcgcaggatgcgattgatgtgaaactgcgcgcg

SEQ ID NO: 8 - protein, 163 aa, Enterobacter timonensis
MRLTSKGRYAVTAMLDVALNSEAGPVPLADISERQGISLSYLEQLFSRLRKNGLVSSVRGPGGGYLLGKDAGSIAVGEVISAVDESVDATRCQGKGGCQGGDKCLTHALWRDLSDRLTGFLNNITLGELVNNQEVLDVSGRQHSHDSQRNTRAQDAIDVKLRA

SEQ ID NO: 9 - DNA, 489 bp, Pluralibacter gergoviae
  CDS (1)..(489): iscR gene encoding Iron Sulfur Cluster Regulator
atgcgcctgaccagcaaaggccgctatgcggtgaccgcgatgctggatgtggcgctgaacagcgaaagcggcccggtgccgctggcggatattagcgaacgccagggcattagcctgagctatctggaacagctgtttagccgcctgcgcaaaaacggcctggtgagcagcgtgcgcggcccgggcggcggctatctgctgggcaaagatgcgggcagcattgcggtgggcgaagtgattagcgcggtggatgaaagcgtggatgcgacccgctgccagggcaaagcgggctgccagggcggcgataaatgcctgacccatgcgctgtggcgcgatctgagcgatcgcctgaccggctttctgaacaacattaccctgggcgaactggtgaacaaccaggaagtgctggatgtgagcgatcgccagcatattcatgaaacccagcgcagcacccgcagccaggatgcgattgatgtgaaactgcgcgcg

SEQ ID NO: 10 - protein, 163 aa, Pluralibacter gergoviae
MRLTSKGRYAVTAMLDVALNSESGPVPLADISERQGISLSYLEQLFSRLRKNGLVSSVRGPGGGYLLGKDAGSIAVGEVISAVDESVDATRCQGKAGCQGGDKCLTHALWRDLSDRLTGFLNNITLGELVNNQEVLDVSDRQHIHETQRSTRSQDAIDVKLRA

SEQ ID NO: 11 - DNA, 486 bp, Buttiauxella
  CDS (1)..(486): iscR gene encoding Iron Sulfur Cluster Regulator
atgcgcctgaccagcaaaggccgctatgcggtgaccgcgatgctggatgtggcgctgaacagcgaaagcggcccggtgccgctggcggatattagcgaacgccagggcattagcctgagctatctggaacagctgtttagccgcctgcgcaaaaacggcctggtggcgagcgtgcgcggcccgggcggcggctatctgctgggcaaagaagcgagcgcgattgcggtgggcgaagtgattagcgcggtggatgaaagcgtggatgcgacccgctgcgcgggcaaaggcggctgccagggcggcgataaatgcctgacccatgcgctgtggcgcgatctgagcgatcgcctgaccggctttctgaacaacattaccctgggcgaactggtgaacaaccaggaagtgctggatgtgagcggccgccagcataacgaaaaccatcgcagcacccgcagccaggatgcgattgatgtgaaactgcgcgcg

SEQ ID NO: 12 - protein, 162 aa, Buttiauxella
MRLTSKGRYAVTAMLDVALNSESGPVPLADISERQGISLSYLEQLFSRLRKNGLVASVRGPGGGYLLGKEASAIAVGEVISAVDESVDATRCAGKGGCQGGDKCLTHALWRDLSDRLTGFLNNITLGELVNNQEVLDVSGRQHNENHRSTRSQDAIDVKLRA

SEQ ID NO: 13 - DNA, 489 bp, Kosakonia sacchari
  CDS (1)..(489): iscR gene encoding Iron Sulfur Cluster Regulator
atgcgcctgaccagcaaaggccgctatgcggtgaccgcgatgctggatgtggcgctgaacagcgaagcgggcccggtgccgctggcggatattagcgaacgccagggcattagcctgagctatctggaacagctgtttagccgcctgcgcaaaaacggcctggtggcgagcgtgcgcggcccgggcggcggctatctgctgggcaaagatgcgaacaccattgcggtgggcgaagtgattagcgcggtggatgaaagcgtggatgcgacccgctgccagggcaaaagcggctgccagggcggcgataaatgcctgacccatgcgctgtggcgcgatctgagcgatcgcctgaccggctttctgaacaacattaccctgggcgaactggtgaacaaccaggaaattctggatgtgagcgatcgccagcataacaacgaaagccatcgcaacacccgcggccaggatgcgattgatgtgaaactgcgcgcg

SEQ ID NO: 14 - protein, 163 aa, Kosakonia sacchari
MRLTSKGRYAVTAMLDVALNSEAGPVPLADISERQGISLSYLEQLFSRLRKNGLVASVRGPGGGYLLGKDANTIAVGEVISAVDESVDATRCQGKSGCQGGDKCLTHALWRDLSDRLTGFLNNITLGELVNNQEILDVSDRQHNNESHRNTRGQDAIDVKLRA

SEQ ID NO: 15 - protein, 162 aa, Salmonella thompson
  PEPTIDE (1)..(162): Iron Sulfur Cluster Regulator (A0A2T9P2P9)
MRLTSKGRYAVTAMLDVALNSEAGPVPLADISERQGISLSYLEQLFSRLRKNGLVSSVRGPGGGYLLGKDAGSIAVGEVISAVDESVDATRCQGKGGCQGGDKCLTHALWRDLSDRLTGFLNNITLGELVNNQEVLDVSGRQHTHDAPRASGRAQDAIDVKL

SEQ ID NO: 16 - protein, 163 aa, Enterobacter cloacae
  PEPTIDE (1)..(163): Iron sulfur cluster regulator (A0A2T9P2P9)
MRLTSKGRYAVTAMLDVALNSESGPVPLADISERQGISLSYLEQLFSRLRKNGLVSSVRGPGGGYLLGKDANSIAVGEVISAVDESVDATRCQGKGGCQGGDKCLTHALWRDLSDRLTGFLNNITLGELVNNQEILDVSDRQHSNESHRNTRGQDAIDVKLRA

SEQ ID NO: 17 - protein, 163 aa, Klebsiella spp
  PEPTIDE (1)..(163): Iron sulfur cluster regulator (A0A2N4YZI6)
MRLTSKGRYAVTAMLDVALYSETGPVPLADISERQGISLSYLEQLFSRLRKNGLVSSVRGPGGGYLLGKDASSIAVGEVISAVDESVDATRCQGKGGCQGGDKCLTHALWRDLSERLTGFLNNITLGELVNNQEILDVSGRQHQHETQRNARTQDAINVKLRA

SEQ ID NO: 18 - protein, 164 aa, Serratia sp
  PEPTIDE (1)..(164): Iron sulfur cluster regulator (A0A1B3FFI8)
MRLTSKGRYAVTAMLDVALHSQEGPVPLADISERQGISLSYLEQLFSRLRKNGLVASVRGPGGGYLLGKDAGEIAVGAVITAVDESVDATRCQGKEGCQGGDRCLTHALWRDLSERISGFLNNITLAELVNNQEVLMVADRQNNDTRRTANGRPQETINVNLRA

SEQ ID NO: 19 - protein, 165 aa, Candidatus Erwinia dacicola
  PEPTIDE (1)..(165): Iron sulfur cluster regulator (A0A1E7YWG2)
MRLTSKGRYAVTAMLDVALHSHEGPVPLADISERQGISLSYLEQLFSRLRKNGLVASVRGPGGGYLLGKASDAIAVGAVITAVDESVDATKCQGKEGCQGGELCLTHVLWRDLSERISDFLNNITLAELVNNKEILDVADRQNSNEIHRAPNGRMQETINVNLHA

SEQ ID NO: 20 - protein, 172 aa, Photobacterium indicum
  PEPTIDE (1)..(172): Iron sulfur cluster regulator (A0A2T3LC11)
MRLTSKGRYAVTAMLDVALHSQDGPVPLADISERQGISLSYLEQLFSRLRKAGLVASVRGPGGGYRLGEDANDIAVGMVIAAVDESVDATKCHGKGDCQGGVRCLTHTLWHDLSSRISGFLNNITLGELMKDNNVQEISGRQDQVLSNSSLRTSFGHKNTHDSTTIGVDVRS

SEQ ID NO: 21 - protein, 173 aa, Vibrio spp.
  PEPTIDE (1)..(173): Iron sulfur cluster regulator (A0A233HBD3)
MRLTSKGRYAVTAMLDVALHSQQTPVPLADISERQGISLSYLEQLFSKLRKAGLVASVRGPGGGYRLGADACSISIGTVIAAVDESVDATKCNGRADCQGGTRCLTHTLWRDLSSRISDFLNNITLGELMIDNEVLEISDRQGLGLTVNHGLTNKNTNTVIIGSVPVGLNARS

SEQ ID NO: 22 - protein, 166 aa, Pseudoalteromonas sp
  PEPTIDE (1)..(166): Iron sulfur cluster regulator (A0A0N8Q524)
MKLTSKGRYAVTALLDVALHTKIGPVPLAEISERQDISLSYLEQLFSRLRKQDLVRSVRGPGGGYLLGKEASEISVGDIISAVNESVDATRCGGEGDCQNGVRCLTHSLWSELSQRIEEFLNSITLAELVAKKDVQQVAGRQDQTVEKAVENSLSQLENINISCQM

SEQ ID NO: 23 - protein, 152 aa, Caviibacterium pharyngocola
  PEPTIDE (1)..(152): Iron sulfur cluster regulator (A0A2M8RVS1)
MKLTSKGRYAVTAILDIALNAETGPVSLADISDRQHISLSYLEQLFAKLRRHGLVKSVRGPGGGYQLGLPTDKISIGMIIAAVNENISVTRCLGQGDCQGGTQCLTHSLWEQLSQRIEDFLNDITLAELVSKQQGQHKHSHEDFNNLVMIGE

SEQ ID NO: 24 - protein, 160 aa, Pseudomonas abyssi
  PEPTIDE (1)..(160): Iron sulfur cluster regulator (A0A2A3ME22)
MRLTTKGRYAVTAMLDLALHEDQGPITLADISMRQGVSISYLEQLFAKLRRGKLVESVRGPGGGYRLAGGAAAISVAQIVEAVNDSMDATRCLGKGDCQDGEVCLTHHLWSDLSARLRQFLNDITLAELVSREDIRRVSSRQDHCISRARHTVSELERII

SEQ ID NO: 25 - protein, 163 aa, Pseudomonas stutzeri
  PEPTIDE (1)..(163): Iron sulfur cluster regulator (A0A2N8S5V8)
MRLTTKGRYAVTAMLDLALHAQHGPVSLADISERQGISLSYLEQLFAKLRRGSLVTSVRGPGGGYQLSRDMAGIQVAQVIDAVNESVDATRCQGLGGCHSGDTCLTHHLWCDLSQQIHEFLSGISLADLVMRQDVQQVALRQDMRKAGGTSPQMDKIETSAIE

SEQ ID NO: 26 - protein, 153 aa, Artificial Sequence
  PEPTIDE (1)..(153): Iron sulfur cluster regulator (A0A2H6G0Z4)
MKLTTKGRYAVTAMLDLAIHYENGPVTLSDIAGRQGISLSYLEQLFARLRRKGLVTSTRGPGGGYRLATEPENIHVAEIVTAINETVDATRCGGEKNCDKDSRCLTHYLWEDLSTRIHEFLYNITLSDLVNQPNVQEVASRQEEKKKVTISSI

SEQ ID NO: 27 - DNA, 489 bp, Escherichia coli
  CDS (1)..(489): iscR mutant gene encoding Iron Sulfur Cluster Regulator protein (IscR) with L15F substitution
atgagactgacatctaaagggcgctatgccgtgaccgcaatgtttgacgttgcgctcaactctgaagcgggcccggtaccgttggctgatatttccgaacgtcagggaatttccctttcttatctggaacaactgttttcccgtctgcgtaaaaatggtctggtttccagcgtacgtggaccaggcggtggttatctgttaggcaaagatgccagcagcatcgccgttggcgaagtaattagcgccgttgacgaatctgtagatgccacccgttgtcagggtaaaggcggctgccagggcggcgataaatgcctgacccacgcgctgtggcgtgatttgagcgaccgtctcaccggttttctcaacaacattactttaggcgaactggttaataaccaggaagtgctggatgtgtctggtcgtcagcatactcacgacgcgccacgcacccgcacacaagacgcgatcgacgttaagttacgcgcttaa

SEQ ID NO: 28 - protein, 162 aa, Escherichia coli
MRLTSKGRYAVTAMFDVALNSEAGPVPLADISERQGISLSYLEQLFSRLRKNGLVSSVRGPGGGYLLGKDASSIAVGEVISAVDESVDATRCQGKGGCQGGDKCLTHALWRDLSDRLTGFLNNITLGELVNNQEVLDVSGRQHTHDAPRTRTQDAIDVKLRA

SEQ ID NO: 29 - DNA, 489 bp, Escherichia coli
  CDS (1)..(489): iscR mutant gene encoding Iron Sulfur Cluster Regulator protein (IscR) with C92Y substitution
atgagactgacatctaaagggcgctatgccgtgaccgcaatgcttgacgttgcgctcaactctgaagcgggcccggtaccgttggctgatatttccgaacgtcagggaatttccctttcttatctggaacaactgttttcccgtctgcgtaaaaatggtctggtttccagcgtacgtggaccaggcggtggttatctgttaggcaaagatgccagcagcatcgccgttggcgaagtaattagcgccgttgacgaatctgtagatgccacccgttatcagggtaaaggcggctgccagggcggcgataaatgcctgacccacgcgctgtggcgtgatttgagcgaccgtctcaccggttttctcaacaacattactttaggcgaactggttaataaccaggaagtgctggatgtgtctggtcgtcagcatactcacgacgcgccacgcacccgcacacaagacgcgatcgacgttaagttacgcgcttaa

SEQ ID NO: 30 - protein, 162 aa, Escherichia coli
MRLTSKGRYAVTAMLDVALNSEAGPVPLADISERQGISLSYLEQLFSRLRKNGLVSSVRGPGGGYLLGKDASSIAVGEVISAVDESVDATRYQGKGGCQGGDKCLTHALWRDLSDRLTGFLNNITLGELVNNQEVLDVSGRQHTHDAPRTRTQDAIDVKLRA

SEQ ID NO: 31 - DNA, 489 bp, Escherichia coli
  CDS (1)..(489): iscR mutant gene encoding Iron Sulfur Cluster Regulator protein (IscR) with H107Y substitution
atgagactgacatctaaagggcgctatgccgtgaccgcaatgcttgacgttgcgctcaactctgaagcgggcccggtaccgttggctgatatttccgaacgtcagggaatttccctttcttatctggaacaactgttttcccgtctgcgtaaaaatggtctggtttccagcgtacgtggaccaggcggtggttatctgttaggcaaagatgccagcagcatcgccgttggcgaagtaattagcgccgttgacgaatctgtagatgccacccgttgtcagggtaaaggcggctgccagggcggcgataaatgcctgacctacgcgctgtggcgtgatttgagcgaccgtctcaccggttttctcaacaacattactttaggcgaactggttaataaccaggaagtgctggatgtgtctggtcgtcagcatactcacgacgcgccacgcacccgcacacaagacgcgatcgacgttaagttacgcgcttaa

SEQ ID NO: 32 - protein, 162 aa, Escherichia coli
MRLTSKGRYAVTAMLDVALNSEAGPVPLADISERQGISLSYLEQLFSRLRKNGLVSSVRGPGGGYLLGKDASSIAVGEVISAVDESVDATRCQGKGGCQGGDKCLTYALWRDLSDRLTGFLNNITLGELVNNQEVLDVSGRQHTHDAPRTRTQDAIDVKLRA

SEQ ID NO: 33 - DNA, 1041 bp, Escherichia coli
  CDS (1)..(1041): bioB gene encoding biotin synthase (EC https://protect-us.mimecast.com/s/UNwXCpYzL4hDME4oHPOASG)
atggctcaccgcccacgctggacattgtcgcaagtcacagaattatttgaaaaaccgttgctggatctgctgtttgaagcgcagcaggtgcatcgccagcatttcgatcctcgtcaggtgcaggtcagcacgttgctgtcgattaagaccggagcttgtccggaagattgcaaatactgcccgcaaagctcgcgctacaaaaccgggctggaagccgagcggttgatggaagttgaacaggtgctggagtcggcgcgcaaagcgaaagcggcaggatcgacgcgcttctgtatgggcgcggcgtggaagaatccccacgaacgcgatatgccgtacctggaacaaatggtgcagggggtaaaagcgatggggctggaggcgtgtatgacgctgggcacgttgagtgaatctcaggcgcagcgcctcgcgaacgccgggctggattactacaaccacaacctggacacctcgccggagttttacggcaatatcatcaccacacgcacttatcaggaacgcctcgatacgctggaaaaagtgcgcgatgccgggatcaaagtctgttctggcggcattgtgggcttaggcgaaacggtaaaagatcgcgccggattattgctgcaactggcaaacctgccgacgccgccggaaagcgtgccaatcaacatgctggtgaaggtgaaaggcacgccgcttgccgataacgatgatgtcgatgcctttgattttattcgcaccattgcggtcgcgcggatcatgatgccaacctcttacgtgcgcctttctgccggacgcgagcagatgaacgaacagactcaggcgatgtgctttatggcaggcgcaaactcgattttctacggttgcaaactgctgaccacgccgaatccggaagaagataaagacctgcaactgttccgcaaactggggctaaatccgcagcaaactgccgtgctggcaggggataacgaacaacagcaacgtcttgaacaggcgctgatgaccccggacaccgacgaatattacaacgcggcagcattatga

SEQ ID NO: 34 - protein, 346 aa, Escherichia coli
MAHRPRWTLSQVTELFEKPLLDLLFEAQQVHRQHFDPRQVQVSTLLSIKTGACPEDCKYCPQSSRYKTGLEAERLMEVEQVLESARKAKAAGSTRFCMGAAWKNPHERDMPYLEQMVQGVKAMGLEACMTLGTLSESQAQRLANAGLDYYNHNLDTSPEFYGNIITTRTYQERLDTLEKVRDAGIKVCSGGIVGLGETVKDRAGLLLQLANLPTPPESVPINMLVKVKGTPLADNDDVDAFDFIRTIAVARIMMPTSYVRLSAGREQMNEQTQAMCFMAGANSIFYGCKLLTTPNPEEDKDLQLFRKLGLNPQQTAVLAGDNEQQQRLEQALMTPDTDEYYNAAAL

SEQ ID NO: 35 - DNA, 1040 bp, Escherichia coli
  CDS (1)..(222): Mutant bioB gene with frameshift  encoding inactive truncated biotin synthase (EC https://protect-us.mimecast.com/s/UNwXCpYzL4hDME4oHPOASG)
atggccaccgcccacgctggacattgtcgcaagtcacagaattatttgaaaaaccgttgctggatctgctgtttgaagcgcagcaggtgcatcgccagcatttcgatcctcgtcaggtgcaggtcagcacgttgctgtcgattaagaccggagcttgtccggaagattgcaaatactgcccgcaaagctcgcgctacaaaaccgggctggaagccgagcggttgatggaagttgaacaggtgctggagtcggcgcgcaaagcgaaagcggcaggatcgacgcgcttctgtatgggcgcggcgtggaagaatccccacgaacgcgatatgccgtacctggaacaaatggtgcagggggtaaaagcgatggggctggaggcgtgtatgacgctgggcacgttgagtgaatctcaggcgcagcgcctcgcgaacgccgggctggattactacaaccacaacctggacacctcgccggagttttacggcaatatcatcaccacacgcacttatcaggaacgcctcgatacgctggaaaaagtgcgcgatgccgggatcaaagtctgttctggcggcattgtgggcttaggcgaaacggtaaaagatcgcgccggattattgctgcaactggcaaacctgccgacgccgccggaaagcgtgccaatcaacatgctggtgaaggtgaaaggcacgccgcttgccgataacgatgatgtcgatgcctttgattttattcgcaccattgcggtcgcgcggatcatgatgccaacctcttacgtgcgcctttctgccggacgcgagcagatgaacgaacagactcaggcgatgtgctttatggcaggcgcaaactcgattttctacggttgcaaactgctgaccacgccgaatccggaagaagataaagacctgcaactgttccgcaaactggggctaaatccgcagcaaactgccgtgctggcaggggataacgaacaacagcaacgtcttgaacaggcgctgatgaccccggacaccgacgaatattacaacgcggcagcattatga

SEQ ID NO: 36 - protein, 74 aa, Escherichia coli
MATAHAGHCRKSQNYLKNRCWICCLKRSRCIASISILVRCRSARCCRLRPELVRKIANTARKARATKPGWKPSG

SEQ ID NO: 37 - DNA, 97 bp, Escherichia coli
  promoter (1)..(97): T5 lacO repressed promoter
tcataaaaaatttatttgctttgtgagcggataacaattataatagattcaaatcggaggttctctaactagtatctctagagctaaggaggtaaat

SEQ ID NO: 38 - DNA, 29 bp, Escherichia coli
  promoter (1)..(29): pBAD Ara promoter
ctgacgctttttatcgcaactctctactg

SEQ ID NO: 39 - DNA, 52 bp, Artificial Sequence
  promoter (1)..(52): LacO T5 IPTG promoter
tcataaaaaatttatttgctttgtgagcggataacaattataatagattcaa

SEQ ID NO: 40 - DNA, 74 bp, Escherichia coli
  promoter (1)..(74): lac Promoter with lacO operator site
agctgtttcctgtgtgaaattgttatccgctcacaattccacacaacatacgagccggaagcataaagtgtaaa

SEQ ID NO: 41 - DNA, 91 bp, Escherichia coli
  terminator (1)..(91): apFAB378 terminator
gagttggtagctcttgatccggcaaacaaaccaccgttggtagcggtggtttttttgtttgcaagcagcagattacgcgcagaaaaaaagg

SEQ ID NO: 42 - DNA, 747 bp, Escherichia coli
  CDS (1)..(747): fpr gene_E. coli encoding a flavodoxin/ferredoxin reductase
atggctgattgggtaacaggcaaagtcactaaagtgcagaactggaccgacgccctgtttagtctcaccgttcacgcccccgtgcttccgtttaccgccgggcaatttaccaagcttggccttgaaatcgacggcgaacgcgtccagcgcgcctactcctatgtaaactcgcccgataatcccgatctggagttttacctggtcaccgtccccgatggcaaattaagcccacgactggcggcactgaaaccaggcgatgaagtgcaggtggttagcgaagcggcaggattctttgtgctcgatgaagtgccgcactgcgaaacgctatggatgctggcaaccggtacagcgattggcccttatttatcgattctgcaactaggtaaagatttagatcgcttcaaaaatctggtcctggtgcacgccgcacgttatgccgccgacttaagctatttgccactgatgcaggaactggaaaaacgctacgaaggaaaactgcgcattcagacggtggtcagtcgggaaacggcagcggggtcgctcaccggacggataccggcattaattgaaagtggggaactggaaagcacgattggcctgccgatgaataaagaaaccagccatgtgatgctgtgcggcaatccacagatggtgcgcgatacacaacagttgctgaaagagacccggcagatgacgaaacatttacgtcgccgaccgggccatatgacagcggagcattactggtaa

SEQ ID NO: 43 - protein, 248 aa, Escherichia coli
MADWVTGKVTKVQNWTDALFSLTVHAPVLPFTAGQFTKLGLEIDGERVQRAYSYVNSPDNPDLEFYLVTVPDGKLSPRLAALKPGDEVQVVSEAAGFFVLDEVPHCETLWMLATGTAIGPYLSILQLGKDLDRFKNLVLVHAARYAADLSYLPLMQELEKRYEGKLRIQTVVSRETAAGSLTGRIPALIESGELESTIGLPMNKETSHVMLCGNPQMVRDTQQLLKETRQMTKHLRRRPGHMTAEHYW

SEQ ID NO: 44 - DNA, 999 bp, Bacillus subtilis
  CDS (1)..(999): YumC gene_B. subtilis encoding a flavodoxin/ferredoxin reductase
atgcgagaggatacaaaggtttatgatattacaattataggcgggggaccggtcggcttattcaccgctttttacggcgggatgagacaggcaagcgtcaaaattatcgaaagcctgcctcagctcggcggacagcttagcgccctataccctgagaagtatatatatgatgtagcgggattcccgaaaatccgcgcgcaagagcttatcaataacctaaaagagcaaatggcgaaattcgaccaaaccatttgtctggagcaagcggttgaatctgttgagaaacaagcggacggcgtgtttaagcttgtaacaaatgaagaaacccactactctaaaacggtcatcataactgcaggaaacggcgcattcaaaccgagaaagctggaacttgaaaatgccgagcagtatgaaggcaaaaacctccattacttcgttgatgatctgcaaaaattcgccggcagacgcgttgcgatccttggcggtggagattccgcggttgactgggcgcttatgcttgagccaatcgcaaaagaagtatcgatcattcaccgccgcgacaagttccgagcgcacgagcacagtgtggaaaaccttcatgcgtcgaaggttaatgtcctgacaccattcgtccctgcggagctgatcggcgaagacaaaatcgaacagctagtgcttgaagaagtgaaaggcgaccgcaaagagattttagaaattgatgacttaatcgtcaactacggtttcgtttcatctcttggaccgatcaaaaactggggcctggacatcgagaaaaattccattgtcgtgaaatcaacaatggaaacaaatatcgaaggcttctttgcagcaggtgacatttgtacatacgaaggaaaagtcaacctgattgccagcggcttcggcgaggcaccgacagcagtgaacaacgccaaggcttacatggacccgaaagcccgcgtacagcctcttcactcaacaagtctttttgaaaataaataa

SEQ ID NO: 45 - protein, 332 aa, Bacillus subtilis
MREDTKVYDITIIGGGPVGLFTAFYGGMRQASVKIIESLPQLGGQLSALYPEKYIYDVAGFPKIRAQELINNLKEQMAKFDQTICLEQAVESVEKQADGVFKLVTNEETHYSKTVIITAGNGAFKPRKLELENAEQYEGKNLHYFVDDLQKFAGRRVAILGGGDSAVDWALMLEPIAKEVSIIHRRDKFRAHEHSVENLHASKVNVLTPFVPAELIGEDKIEQLVLEEVKGDRKEILEIDDLIVNYGFVSSLGPIKNWGLDIEKNSIVVKSTMETNIEGFFAAGDICTYEGKVNLIASGFGEAPTAVNNAKAYMDPKARVQPLHSTSLFENK

SEQ ID NO: 46 - DNA, 780 bp, Pseudomonas pudita
  CDS (1)..(780): fpr-1 gene from Pseudomonas putida KT2440 encoding a flavodoxin/ferredoxin reductase
atgagcaacatgaaccacgaacgtgtcctcagtgtgcaccactggaacgacaccctgttcagcttcaagtgcacccgcgacccgggcctgcgcttcgagaacggtcagttcgtgatgatcggcctgcagcaggacaacggccgtccgctcatgcgtgcctactccatcgcttcgccaaactgggaagagcaccttgaattcttcagcatcaaggtgccggacggcccgctgacctcgcagctgcagcacctgaaggaaggcgatgagatcatcatcagcaagaagcctaccggcaccctggtcctcgacgacctgaatcctggcaagcacctgtacctgctgagcaccggcactggtctggcgccgttcatgagcgtcatccaggacccggaaacctacgagcgctttgaaaaagtgatcctggtgcacggcgtgcgctatgtgaacgaagtggcctaccgcgagttcatcaccgagcacctgccgcagaacgagttcttcggtgagtcggttcgcgacaagctgatctactacccgaccgtgacccgcgagccgttcgaaaaccagggccgtctgaccgacctgatgcgcagcggcaagctgttcagcgacatcggcctgccgccgatcaacccgcaagacgaccgcgcgatgatctgcggcagcccgagcatgctcgacgagaccagcgaagtgctggacagcttcggcctgaagatctccccgcgcatgcgcgagccgggtgactacctgatcgaacgtgccttcgtcgagaagtaa

SEQ ID NO: 47 - protein, 259 aa, Pseudomonas pudita
MSNMNHERVLSVHHWNDTLFSFKCTRDPGLRFENGQFVMIGLQQDNGRPLMRAYSIASPNWEEHLEFFSIKVPDGPLTSQLQHLKEGDEIIISKKPTGTLVLDDLNPGKHLYLLSTGTGLAPFMSVIQDPETYERFEKVILVHGVRYVNEVAYREFITEHLPQNEFFGESVRDKLIYYPTVTREPFENQGRLTDLMRSGKLFSDIGLPPINPQDDRAMICGSPSMLDETSEVLDSFGLKISPRMREPGDYLIERAFVEK

SEQ ID NO: 48 - DNA, 936 bp, Streptomyces venezuelae
  CDS (1)..(936): SVEN_0113 gene from Streptomyces venezuelae encoding a flavodoxin/ferredoxin reductase
atgagcgagaacccgctgcaactgatcgtccaccgcatgacacgggaggccgagggcgtactgtccgtcgaactcgcccaccccgacggcaagccgctgcccgcctggacgccgggcgcccacatcgacgtccacgtcgggggccacgtccgccagtacagcctgtgcggcgacccgcacgaccagggcgcgtaccggatcggcgtcctcgacgaacccgcctcacgcggcggttcgcgcttcgtgcacaccgcactgcgccccggccagaccctcacggtctccgcaccccgcaaccacttcgccctcgaggacgccgccgcgtacgtcctcgtcgccggcggcatcggcatcacgcccctgctcgccatggcccgcgaggcggcccgccggggcgccgagtggcgcctggtctacggcggccggagccgggcgtcgatggccttcaccgccgaactggccctgctcggcggcgaggtgaccctcgtcccgcaggacgaacgcggccacatcgacctggacgccgagctgtcccggctgcccgacggcgccctcgtctacgcctgcggcccggaacccctcctcgcggccgtcgaggaacgctgtccgcaaggacagctgcgcaccgaacggttcaccgcccccaccgtcgaacgcgcagaagacgacggagagttcgaggtcgagtgccgcacctcgggcctgacgctccgggtcgacgcacactcctcgatcctcgacgccgccgagaacgccgggatcgccgtcgacagctcctgccgcgacggcatctgcggctcctgcgagacccgcgtcctcgaaggcaccccggaccaccgcgacttcctcctcagcgaggcggaacaggccgccggcgccaccatgatgatctgcgtctcgcggtgcgcctccggccggctcgtcctcgacctgtga

SEQ ID NO: 49 - protein, 311 aa, Streptomyces venezuelae
MSENPLQLIVHRMTREAEGVLSVELAHPDGKPLPAWTPGAHIDVHVGGHVRQYSLCGDPHDQGAYRIGVLDEPASRGGSRFVHTALRPGQTLTVSAPRNHFALEDAAAYVLVAGGIGITPLLAMAREAARRGAEWRLVYGGRSRASMAFTAELALLGGEVTLVPQDERGHIDLDAELSRLPDGALVYACGPEPLLAAVEERCPQGQLRTERFTAPTVERAEDDGEFEVECRTSGLTLRVDAHSSILDAAENAGIAVDSSCRDGICGSCETRVLEGTPDHRDFLLSEAEQAAGATMMICVSRCASGRLVLDL

SEQ ID NO: 50 - DNA, 978 bp, Corynebacterium glutamicum
  CDS (1)..(978): Cgl2384 gene from Corynebacterium glutamicum encoding a flavodoxin/ferredoxin reductase
atgaactcgcaatggcaagatgcacatgttgtttccagcgaaatcatcgctgcagacattcggcgaatagaactatccccgaaatttgcgattccagtaaaacccggcgaacatctcaagatcatggtgcccctaaaaactggacaggaaaagagatcgtactccatcgttgacgctcgtcacgacggttcgactctcgccctgagcgtactcaaaaccagaaactcccgtggaggatctgagttcatgcatacgcttcgagctggagacacagttactgtctccaggccgtctcaggattttcctctccgcgtgggtgcgcctgagtatgtacttgttgccggcggaattggaatcacagcgatccgttcaatggcatctttattaaagaaattgggagcgaactaccgcatccatttcgcagcacgcagccttgatgccatggcttacaaagatgagctcgtggcagaacacggcgacaagctgcacctgcatctagattctgaaggcaccaccatcgatgtcccagcattgatcgaaaccttaaacccccacactgagctttatatgtgcggccccatccgcttgatggatgccatccggcgcgcatggaacacccgcggacttgaccccaccaatctgcgtttcgaaacgtttggaaacagtggatggttctccccagaggttttccacatccaagtaccagagctggggcttcacgccacagtcaacaaggatgaaagcatgctggaggctttgcaaaaggctggggcgaatatgatgtttgattgtcgaaaaggcgaatgtggtttgtgccaggttcgcgttctagaagtcgatggccaggttgatcaccgcgatgtgttcttctctgatcgtcaaaaagaatccgacgcaaaggcatgcgcctgcgtgtctcgagtagtctcctccccttcctcgtccccaacctcgaccattacggtcgccctctcctaa

SEQ ID NO: 51 - protein, 325 aa, Corynebacterium glutamicum
MNSQWQDAHVVSSEIIAADIRRIELSPKFAIPVKPGEHLKIMVPLKTGQEKRSYSIVDARHDGSTLALSVLKTRNSRGGSEFMHTLRAGDTVTVSRPSQDFPLRVGAPEYVLVAGGIGITAIRSMASLLKKLGANYRIHFAARSLDAMAYKDELVAEHGDKLHLHLDSEGTTIDVPALIETLNPHTELYMCGPIRLMDAIRRAWNTRGLDPTNLRFETFGNSGWFSPEVFHIQVPELGLHATVNKDESMLEALQKAGANMMFDCRKGECGLCQVRVLEVDGQVDHRDVFFSDRQKESDAKACACVSRVVSSPSSSPTSTITVALS

SEQ ID NO: 52 - DNA, 921 bp, Sphingobacterium sp
  CDS (1)..(921): SJN15614.1 from Sphingobacterium sp. JB170 encoding a flavodoxin/ferredoxin reductase
atgtttggcgatcgcgaggttcgtagatcgtattcctttagtagctcgcctgcagttgttgagccgctagccattaccgtaaaaagagtggataatggggaaatttcccgcctgttgcatcatcgtacacgcgttggggatcttgttgatgttctagccccgcagggattatttacatacgaacctgaccccactacagctcgaacattatttttatttggcgccggcgttggtgttactccgttattttccatcctgaaaactgcgctgtccacagaacccaaaacgaaggttgtcctcatttatagcaacagttcacccgataggacagtttttaaagttgaacttgaacattggcaacaactgtatgccgatcggcttgaaattatatggatttactccaattcaaaaaatctgttaaatgcacacctaaaccgcgagaacttattacgctttgtcaatgaacgcatgcctgaggataacaatgctatatttttcacctgtggtccggtattttacatggacttagtacgcttcacgttactcggtcttggaatccccgacgaggatatccgcaaggagacatttcattttcctgaagaagaagatgatgaagatgagaaagaagacgatccggttgatacgacagcgtacaacatattgctcaggtttcaaggacaagaatacccgttgacaattccatacaacaaaacaatcttgcaggccggactggataataatattaaacttccctattcttgtaaatcggggatgtgtagtacttgtatctcacaatgttccagcgggtccgtccggatggattacaatgaggttctaacagatcgtgaggttgaaaatggccgttgtttgatttgtacttcccacccgttagaagatggtacgacgattgatgtagtttaa

SEQ ID NO: 53 - protein, 306 aa, Sphingobacterium sp
MFGDREVRRSYSFSSSPAVVEPLAITVKRVDNGEISRLLHHRTRVGDLVDVLAPQGLFTYEPDPTTARTLFLFGAGVGVTPLFSILKTALSTEPKTKVVLIYSNSSPDRTVFKVELEHWQQLYADRLEIIWIYSNSKNLLNAHLNRENLLRFVNERMPEDNNAIFFTCGPVFYMDLVRFTLLGLGIPDEDIRKETFHFPEEEDDEDEKEDDPVDTTAYNILLRFQGQEYPLTIPYNKTILQAGLDNNIKLPYSCKSGMCSTCISQCSSGSVRMDYNEVLTDREVENGRCLICTSHPLEDGTTIDVV

SEQ ID NO: 54 - DNA, 3525 bp, Escherichia coli
  CDS (1)..(3525): ydbK gene from E. coli encoding pyruvate-flavodoxin/ferredoxin oxidoreductase
atgattactattgacggtaatggcgcggttgcttcggtcgcatttcgcaccagtgaagttatcgccatctaccctattacccccagttccacgatggcagaacaggctgatgcctgggccggaaacggcttaaagaacgtttggggagacacaccacgcgtggttgaaatgcagtcggaagcgggtgctatcgctaccgtgcatggcgctttgcagacgggtgccctttcaacatcgtttacgtcatcgcagggtttgctgctgatgatcccgacgctgtacaaactggcaggcgaactaacaccgtttgtcctgcatgtagcggcacgtaccgttgccacacatgcactctctatttttggcgatcattccgacgttatggcggtgcgccagacgggttgcgcgatgttgtgtgcagcaaacgtccaggaagcgcaagactttgctctcatttcgcaaatcgcgacgctgaaaagccgcgtgccatttattcatttctttgatggtttccgcacgtcccacgaaatcaataaaattgtcccgctggccgatgacacgattcttgatctcatgccgcaggtcgaaattgatgctcatcgcgcccgggcactcaacccggaacatccggtgatccgcggtacgtccgccaatcctgacacttatttccagtctcgcgaagccaccaacccatggtacaacgcggtctatgaccatgttgaacaggcgatgaatgatttctctgccgcgacaggtcgtcagtatcagccgtttgaatattacgggcatccgcaagcggaacgggtgattatcctgatgggctctgccattggcacctgtgaagaagtggttgatgaattgctaacccgtggcgaaaaagttggcgtgctgaaagttcgcctgtaccgccccttctccgctaaacatttactgcaagctctgccgggatccgtacgcagcgtggcggtactggacagaaccaaagaacccggtgcccaggcagaaccgctctatctggatgtaatgaccgcactggcagaagcctttaataatggcgagcgcgaaactctgccccgtgtcattggtgggcgctatggtctttcatccaaagaatttggcccagactgtgtactggcggtatttgccgagctcaacgcggctaaaccgaaagcgcgctttacggttggtatttacgatgatgtgaccaatctgtcactgccgttgccggaaaacaccctgccaaactcggcgaaactggaagccttgttttatggccttggtagtgatggcagcgtttccgcgaccaaaaacaatatcaagattatcggtaattccacgccgtggtacgcacagggctattttgtttacgactccaaaaaggcgggcggcctgacggtttctcaccttcgagtgagcgaacagccgattcgttccgcttatctcatttcccaggctgattttgttggctgccaccagttgcagtttatcgataaatatcagatggctgagcgtttaaaacctggcggcattttcctgctcaacacgccgtacagcgcagatgaagtgtggtcgcgcttgccgcaagaagttcaggccgtgttaaaccagaaaaaagcgcgcttctatgtgattaacgcggcgaaaatcgcccgcgaatgtggcctggcggcccgtattaataccgtcatgcagatggcttttttccatctgacgcaaattctgcctggcgatagcgccctcgcagaattgcagggtgcgattgccaaaagttacagtagcaaaggccaggatctggtggaacgcaactggcaggctctggcgctggcgcgtgaatccgtagaagaagttccgttgcaaccggtaaatccgcacagcgccaatcgaccgccagtggtttccgatgccgcccctgatttcgtgaaaaccgtaaccgctgcgatgctcgccgggcttggtgacgccctccccgtttcggcgctgccgccagacggcacctggccgatgggcactacgcgctgggaaaaacgcaatatcgccgaagagatccccatctggaaagaggaactctgtacccaatgtaaccactgcgttgccgcttgcccacactcagctattcgcgcaaaagtggtgccgcctgaagcgatggaaaacgcccctgccagcctgcattcgctggatgtgaaatcgcgtgatatgcgcgggcagaaatatgtcttgcaggtggcaccggaagattgcaccggttgtaacctgtgcgtcgaagtttgcccggcgaaagaccgtcagaatccagagattaaagccatcaatatgatgtctcgcctggaacatgtcgaagaagagaaaatcaattacgatttcttcctcaacctgccagaaatcgaccgtagcaaactggaacgtattgatattcgtacatcgcagctgattacaccgctgtttgaatattcaggtgcttgctccggttgtggcgagacgccgtatattaaattactgactcagctctatggcgaccggatgttgatcgctaacgccactggctgttcttcaatttatggcggtaacctgccctctacaccgtataccaccgatgccaacggtcgtgggccggcatgggcgaactctctatttgaagataatgccgaatttggccttggtttccgcctgacggtcgatcaacaccgtgtccgcgtgctgcgtctgctggatcaatttgccgataaaatcccggcggaattactgacggcgttgaaatcagacgccacgccagaggttcgtcgtgaacaggttgcagctttacgccagcaactcaacgatgttgccgaagcacatgaactgctacgtgatgcagatgcactggtggaaaaatcaatctggctgattggtggtgatggctgggcttacgatatcggctttggcggtctggatcatgtattgagtttgacggaaaacgtcaacattctggtgctggatacgcaatgctattccaacaccggtggtcaggcgtcgaaagcgacaccgctgggtgcagtaactaaatttggcgagcacggcaaacgtaaagcgcgtaaagatcttggcgtcagtatgatgatgtacggtcatgtttatgtggcgcagatttctctcggcgcgcagctgaaccagacggtgaaagcgattcaggaagcggaagcgtatccggggccatcgctgatcattgcttatagcccgtgtgaagagcatggttacgatctggcactcagccacgaccagatgcgccaactcacagctaccggcttctggccgctatatcgctttgatccgcgtcgtgccgatgaaggcaaactgccgctggccttggattcacgcccgccgtcagaagcaccggaagaaacgttacttcacgagcaacgtttccgtcggctgaattcgcagcagccagaagtggcagaacagttatggaaagatgctgcagctgatttgcaaaaacgctatgacttcctggcacaaatggccggaaaagcggaaaaaagcaacaccgattaa

SEQ ID NO: 55 - protein, 1174 aa, Escherichia coli
MITIDGNGAVASVAFRTSEVIAIYPITPSSTMAEQADAWAGNGLKNVWGDTPRVVEMQSEAGAIATVHGALQTGALSTSFTSSQGLLLMIPTLYKLAGELTPFVLHVAARTVATHALSIFGDHSDVMAVRQTGCAMLCAANVQEAQDFALISQIATLKSRVPFIHFFDGFRTSHEINKIVPLADDTILDLMPQVEIDAHRARALNPEHPVIRGTSANPDTYFQSREATNPWYNAVYDHVEQAMNDFSAATGRQYQPFEYYGHPQAERVIILMGSAIGTCEEVVDELLTRGEKVGVLKVRLYRPFSAKHLLQALPGSVRSVAVLDRTKEPGAQAEPLYLDVMTALAEAFNNGERETLPRVIGGRYGLSSKEFGPDCVLAVFAELNAAKPKARFTVGIYDDVTNLSLPLPENTLPNSAKLEALFYGLGSDGSVSATKNNIKIIGNSTPWYAQGYFVYDSKKAGGLTVSHLRVSEQPIRSAYLISQADFVGCHQLQFIDKYQMAERLKPGGIFLLNTPYSADEVWSRLPQEVQAVLNQKKARFYVINAAKIARECGLAARINTVMQMAFFHLTQILPGDSALAELQGAIAKSYSSKGQDLVERNWQALALARESVEEVPLQPVNPHSANRPPVVSDAAPDFVKTVTAAMLAGLGDALPVSALPPDGTWPMGTTRWEKRNIAEEIPIWKEELCTQCNHCVAACPHSAIRAKVVPPEAMENAPASLHSLDVKSRDMRGQKYVLQVAPEDCTGCNLCVEVCPAKDRQNPEIKAINMMSRLEHVEEEKINYDFFLNLPEIDRSKLERIDIRTSQLITPLFEYSGACSGCGETPYIKLLTQLYGDRMLIANATGCSSIYGGNLPSTPYTTDANGRGPAWANSLFEDNAEFGLGFRLTVDQHRVRVLRLLDQFADKIPAELLTALKSDATPEVRREQVAALRQQLNDVAEAHELLRDADALVEKSIWLIGGDGWAYDIGFGGLDHVLSLTENVNILVLDTQCYSNTGGQASKATPLGAVTKFGEHGKRKARKDLGVSMMMYGHVYVAQISLGAQLNQTVKAIQEAEAYPGPSLIIAYSPCEEHGYDLALSHDQMRQLTATGFWPLYRFDPRRADEGKLPLALDSRPPSEAPEETLLHEQRFRRLNSQQPEVAEQLWKDAAADLQKRYDFLAQMAGKAEKSNTD

SEQ ID NO: 56 - DNA, 3588 bp, Geobacter sulfurreducens
  CDS (1)..(3588): por gene from Geobacter sulfurreducens AM-1 encoding pyruvate-flavodoxin/ferredoxin oxidoreductase
atgagtcgcaaaatggtaaccatcgacggcaataccgcggctgcccacgtggcgcacgccaccaacgaggtcattgccatctaccccattaccccttcgtcggtcatgggtgagatttccgacatcaagagcgccatgggcgagaaaaacatctggggaaccgtaccgtcggttgtcgagatgcagtcggaaggcggcgctgccggtgccgtgcacggtgccctccaggcaggtgcgctgaccaccacttttaccgccagccagggtctgctcctgatgatcccgaacatgttcaagatcgccggcgagctgacctctacggtcttccatgtctccgcccgcgccatcgcggcccaggccctctccatctttggcgaccattcggacgtcatgtcctgccgttccaccggttgggccatgctctgctccaacaactcccaggaggtcatggacttcgccctgattgcccagtccgcgacgcttcgttcccgggtgccgttcctccatttcttcgacggcttccggacctcccacgaggttctcaaggtggaggagctgactttcgacgacatgcgcgccatgctggacgacgaactgatcgccgcccacaaggcccggggcctctctccggaccatcccgtcatgcgcggcaccgcccagaaccctgacgtctacttccaggggcgcgagaccgttaaccccttctacccgaaatgcatcgagatcgtggcagaggagatggacaagttcgccaagatcacgggccgccagtacaagctggtggactacgtgggcgcccccgacgccgaccgggtcatcgtcatcatgggatccggcgccgacacggtgcaggagaccgtggagcacctgaacaccaagggtgagaagatcggcgtggtgaaggtccacctctaccggccgttccccatcgatgccttcattgccgccctgcccaagaccgtgaagaagatcgcggtcctcgaccggaccaaggagcccggcgccctgggcgagcccctgtacctggatgtccgcactgccatcggcgaggccatggccgacgggaagtgccagttcgacggctacccggtcatcgtgggcggtcgctacggccttggttccaaggagttcaccccggcccaggccaaggcggtgttcgataacctagccactgccaagccgcagaacaagttcgtggtcggcatcaccgaggacgtgaccaacagcagcctcccgtgtgatccgtccttcttcaacccgatggaaggggcctaccaggccatgttcttcggcctcggctccgacggtaccgtgggcgccaacaagaactccatcaagatcatcggcgagatgaccgataacaacgcccaggcctacttcgtctacgactccaagaaggccggctccatgaccacctcgcacctgcgcttcggcaagaagtacatcagagcgccgtacctggtgcaggaggccgacttcgtggcctgccacaacttcgccttcgtggaaaagtacgacatgctggccaaggccaagcagggtgccacgttcctcctgaacgccccttacgaccacaacgaggtgtgggacaggctccccgccgacatgcagcagcagatcatcgacaagaagctcaagttcttcgtgatcgatggggtacgcctcggcaacgagatcgggctcggtccccggatcaacgtgatcatgcagaccgccttcttcaagatatccaacatcatcccgctggatcaggccattgacgagatcaaggacgctatcaagaaaacctatggcaaggcaggcgagaaggtcgtggagatgaactacaaggcggttgaggccggcctcaacaacttctacgaggtaacggtaccggcaacggcaaccagtaccctccagaagcctcccgtggtcagcgccagggccccccagttcgtgcaggagaccaccgcccccatcatcgccggcctcggcgacgacctgccggtgtccaagatgccggccgacggcaccttcccgacggcgacctcccagttcgaaaagcggaacatcgccgtggagatccccgtgtgggacgagcagctctgcatccagtgcggcatctgctccttcgtctgcccccacgccaccatcaggatgaaggcctatgacgcctccgcccttgccggcgccccggcagcgttcaagtcggttgactgcaagattcccgagttcaaggggcagaagttcaccatccaggtagccccggaagactgcaccggctgcggcgcctgcgtccacaactgcccggccaagagtaaggaagacccgaaccacaaggccatcaatatggcataccagccgcccctgcgttctcaagaggtcgagaactgggacttcttcctcaccatcccggacgtggaccccaccgtagccaagctggacacggtccgcggttcccagttggtgcggccgctgttcgaattctccggcgcctgcctcggctgcggcgagaccccgtacctgaagctcctgacccagctcttcggcgaccggaccgtcattgccaacgccaccggctgctcctccatctacggcggaaacctgcccaccaccccctatgcccagcgggccgacgggcttgggccggcatggtcgaactccctgttcgaggacaacgccgagttcggctacggcatgcgtctggccgtggataaattcaacgccatggcccttgagctggtcgacaagctttcgtcttcctgctcctgctcttcctgcacgagcgcggtgcccctcatgaacgagatcaagggcgccgaccagtcgagccaggccggcatcgaggcccagcgggcccgggtggcggagctgaagaagacccttgcttcctgtcccgagccggatgccaagcgcctgctcaccgtggccgactacctggtcaagaagtccgtctggtgcatcggcggcgacggctgggcgtacgatatcggctacggcggcctcgaccacgtcatcgccagcggcaagaacatcaatctgctggtgctcgacaccgaggtctactccaacaccggcggccaggcttccaagtcgaccccgctgggcgccgtggcccagttcgccgccggcggtaagccggtctccaagaaggatctcggcatgatggccatggcctacgggtcggtctacgtggccactgtctccctcgccaatccggcccagtgcatcaaggcgttcctggaggccgaggcctatgacggtccgtcgctcatcatcgcctatgcccactgcatcgcccacggcatcgacatgaccagcggcgtggatgcccagaagcgggcggttcagtccggttactggcccctctaccgctataatccgcagctggccgccgagtgcaagaacccgctccagctcgacagcaaggccccgaccatcgcctttgaagagtacgtcaacagcgagaaccgctaccgcgtcctcaagaagaacaacccgaaagggtacgaggatctcatgagaaaagcggcggcatggtccaaggcccacttcagctactaccagaagctggcggccctcaacttcgaggatacctgcgagaagtag

SEQ ID NO: 57 - protein, 1195 aa, Geobacter sulfurreducens
MSRKMVTIDGNTAAAHVAHATNEVIAIYPITPSSVMGEISDIKSAMGEKNIWGTVPSVVEMQSEGGAAGAVHGALQAGALTTTFTASQGLLLMIPNMFKIAGELTSTVFHVSARAIAAQALSIFGDHSDVMSCRSTGWAMLCSNNSQEVMDFALIAQSATLRSRVPFLHFFDGFRTSHEVLKVEELTFDDMRAMLDDELIAAHKARGLSPDHPVMRGTAQNPDVYFQGRETVNPFYPKCIEIVAEEMDKFAKITGRQYKLVDYVGAPDADRVIVIMGSGADTVQETVEHLNTKGEKIGVVKVHLYRPFPIDAFIAALPKTVKKIAVLDRTKEPGALGEPLYLDVRTAIGEAMADGKCQFDGYPVIVGGRYGLGSKEFTPAQAKAVFDNLATAKPQNKFVVGITEDVTNSSLPCDPSFFNPMEGAYQAMFFGLGSDGTVGANKNSIKIIGEMTDNNAQAYFVYDSKKAGSMTTSHLRFGKKYIRAPYLVQEADFVACHNFAFVEKYDMLAKAKQGATFLLNAPYDHNEVWDRLPADMQQQIIDKKLKFFVIDGVRLGNEIGLGPRINVIMQTAFFKISNIIPLDQAIDEIKDAIKKTYGKAGEKVVEMNYKAVEAGLNNFYEVTVPATATSTLQKPPVVSARAPQFVQETTAPIIAGLGDDLPVSKMPADGTFPTATSQFEKRNIAVEIPVWDEQLCIQCGICSFVCPHATIRMKAYDASALAGAPAAFKSVDCKIPEFKGQKFTIQVAPEDCTGCGACVHNCPAKSKEDPNHKAINMAYQPPLRSQEVENWDFFLTIPDVDPTVAKLDTVRGSQLVRPLFEFSGACLGCGETPYLKLLTQLFGDRTVIANATGCSSIYGGNLPTTPYAQRADGLGPAWSNSLFEDNAEFGYGMRLAVDKFNAMALELVDKLSSSCSCSSCTSAVPLMNEIKGADQSSQAGIEAQRARVAELKKTLASCPEPDAKRLLTVADYLVKKSVWCIGGDGWAYDIGYGGLDHVIASGKNINLLVLDTEVYSNTGGQASKSTPLGAVAQFAAGGKPVSKKDLGMMAMAYGSVYVATVSLANPAQCIKAFLEAEAYDGPSLIIAYAHCIAHGIDMTSGVDAQKRAVQSGYWPLYRYNPQLAAECKNPLQLDSKAPTIAFEEYVNSENRYRVLKKNNPKGYEDLMRKAAAWSKAHFSYYQKLAALNFEDTCEK

SEQ ID NO: 58 - DNA, 1956 bp, Streptomyces pratensis
  CDS (1)..(1956): Sfla_2592 gene from Streptomyces pratensis ATCC 33331encoding pyruvate-flavodoxin/ferredoxin oxidoreductase
atgaccagccaggtcagtagcccagccggaaagtccgatgaggccagcgaggctgtcgtcggggaacagcgcgccccgcacatcgccggtgcgggtggcacggagaaggaaatccgccgtctggaccgggtgatcatccgtttcgcgggtgactcgggtgacggtatgcagttgacgggcgaccgtttcacgtcggagacggcgtcgttcgggaacgacctgtcgacactgcccaacttcccggccgagatccgggcacccgccggcaccctgcccggggtgtcgtcgttccagctgcatttcgcggaccacgacatcctgacaccgggcgacgcgccgaacgtcctggtcgcgatgaatcccgccgcgctgaaggcgaatatcgccgatgtgccgcgcggggccgacatcatcgtgaacacggacgagttcacgaagcgcccgatggcgaaagtcggatatgcggaatcccctttggaggacggttccctcgaggcgtacaacgtgcatccggtgccgttgacgacgttgacgatcgaggctttgaaggagttcgggctttcccgcaaggaggccgagcggtcgaagaacatgttcgcgctcgggcttctgtcctggatgtacaaccgtccgaccgagggtacggagaagttcctgcggtcgaagttcgccaggaagccggagatcgccgaggccaatgtggcggctttccgcgcgggctggaatttcggtgagacgacggaggatttcgctgtctcctacgaggtcgcaccggcgtcacaggatttcccgacgggcacctaccgcaatatctccgggaatctcgcactgtcgtacgggctgatcgcggcgggacggcaggccgatctgccggtgtatctcggctcgtatccgatcactccggcgtccgacatcctgcacgagctcagcaagcacaagaacttcggtgtgcggaccttccaggcggaggacgagatcgccgggatcggtgcggccctgggcgcgtcgttcggcggttcactgggtgtgacgacgacgtcgggcccgggtgtggcgctgaagtcggagacgatcggcctggcggtgtcactggaactgccgctgctgatcatcgacatccagcgcggcggcccctccaccggcctgccgaccaagaccgagcaggccgacctgctccaggccatgtacgggcgcaacggcgaggccccggtcccgatcgtggcaccgaggactccggcggactgcttcgacgccgccctggacgcggcgcggatcgcgctgacctaccgcaccccggtcttcctgctctcggacgggtacctcgcgaacggctccgagccgtggcggatccccgaggccgacagcctccccgacctgcggacacggttcgcgaccggcccgaatcacgaactcgcggacggcaccgaggtgttctggccctacaagagggaccccgagacgctggcccgcccgtgggcggtgcccggcaccccgggtctggagcaccggatcggcgggatcgagaagcaggacggcacggggaacatctcctacgatccggccaaccacgacttcatggtccgcacccgccaggccaagatcgacggcatccgggtccccgacctggaggtcgacgacccggccggcgcgacgaccctggtcctgggctggggttcgacgtacgggccgatcaccgccgccgtgcgccgtctccgcgcggccggcgagacgatcgcacaggcacatctgcgccacctcaatcccttccccgccaatctcggtgaggtactgcggcgctacgacaaggtcgtcgtccccgagatgaacctcggtcagctcgccctgctgctgagagccaagtacctcgtggacgcgcagagtttcaaccaggtcaacggaatgcccttcaaggcggagcagctcgccacagccctcaaggaggccatcgatgcctga

SEQ ID NO: 59 - protein, 651 aa, Streptomyces pratensis
MTSQVSSPAGKSDEASEAVVGEQRAPHIAGAGGTEKEIRRLDRVIIRFAGDSGDGMQLTGDRFTSETASFGNDLSTLPNFPAEIRAPAGTLPGVSSFQLHFADHDILTPGDAPNVLVAMNPAALKANIADVPRGADIIVNTDEFTKRPMAKVGYAESPLEDGSLEAYNVHPVPLTTLTIEALKEFGLSRKEAERSKNMFALGLLSWMYNRPTEGTEKFLRSKFARKPEIAEANVAAFRAGWNFGETTEDFAVSYEVAPASQDFPTGTYRNISGNLALSYGLIAAGRQADLPVYLGSYPITPASDILHELSKHKNFGVRTFQAEDEIAGIGAALGASFGGSLGVTTTSGPGVALKSETIGLAVSLELPLLIIDIQRGGPSTGLPTKTEQADLLQAMYGRNGEAPVPIVAPRTPADCFDAALDAARIALTYRTPVFLLSDGYLANGSEPWRIPEADSLPDLRTRFATGPNHELADGTEVFWPYKRDPETLARPWAVPGTPGLEHRIGGIEKQDGTGNISYDPANHDFMVRTRQAKIDGIRVPDLEVDDPAGATTLVLGWGSTYGPITAAVRRLRAAGETIAQAHLRHLNPFPANLGEVLRRYDKVVVPEMNLGQLALLLRAKYLVDAQSFNQVNGMPFKAEQLATALKEAIDA

SEQ ID NO: 60 - DNA, 3768 bp, Propionibacterium freudenreichii
  CDS (1)..(3768): RM25_0186 gene from Propionibacterium freudenreichii DSM 20271encoding pyruvate-flavodoxin/ferredoxin oxidoreductase
atgactacaactacccgtgggccggttcccggctcgaatggcatgcccgccaatccaggtctgagcggcgaggccgccaccgcaaccccgtcacccgttgacgtcgctgccggcgccaaggacgctgccgatgagctggcccagtcacgacgcgagcaggacatcacccatcagatgatctgcgacggcaacaccgccgcctctgatgtggccttccgcatcaatgagctgtgctcgatctacccgatcacgccgagctccccgatggccgaactggccgacgagtggagtgcccgcgaccgcatgaacatctggggccaggtgccccatgtgatggagatgcagtcggaggccggcgcggccggtgccatgcacggctccctgcagggcggcgccctggcgaccaccttcacggcgtcgcagggcctgctgctgatgatcccgaacatgtacaagatcgccggtgagctcacctccacggtgatgcacgtcgccgcgcgctcgctggccacccagggcctgtcgatcttcggtgatcaccaggacgtgatggcctgtcgccagaccggttgggcgatgctgtgctccaccggcgtgcagcagtgccatgacaatgccctgatctcccaggtcgccacgctgcgttcgcgcgtgccgttcatgcacttcttcgacggcttccgcaccagccatgagctcaacacctgcatccagctcaccgacgaccagctgcgttcgatggtgcccgatgcgctcgtgcgcgagcaccgcgagcgggccctgtcgcccgacaacccgttcatccgtggcaccgcccagaacgccgacgtgtacttccagggccgcgaggccggcaacaagtactacgactcggttccgggcatcgtgcaggacgcgatggacgagttcgccgccatgaccggccgccagtaccacctggccgactactacggcgcgcccgacgccgatcgcgtcatcgtgatcatgggctcgggtgccgagaccgtgcagcagaccgtcagcaagctcaatgagcagggcgagaaggtcggcctggtggtcatccgcctgtaccgtccgttcccgacgcaggccgtgctggactgcattcccgcatcggtcaagaagatcgccgtgctcgaccgcaccaaggagccgggctccaacggtgagcccctgttcctcgacgtggtctcggcagtctccgaggcctattcgaacggcgagcgcgacaacctgcccgccatcatcggtggccgctacggcctgtcgagcaaggagttcacgccgggcatgtgcgccgccgtgtacgacgagctcgccaaggacaagccgaagcgtcgcttcaccgtcggcatcaccgacgatgtgacgcacctgtcgatcccgtgggacgcctcgctcgacctggaggaccccgagacctcgcgcgcagtgttctacggcatcggtgctgacggcaccgtcggcgccaacaagaacaccatcaagatcctcggctccgagccgggcacctacgcgcagggctacttcgtctacgactcgaagaagtccggcggccgcaccacctcgcaccttcgcttcggacccgatccgatcaaggccccctacctggtgaaccaggccggcttcatcggcgtgcaccactgggccgaccttgagcgcatcgacgtgctggcgttcgcccgcaagggcaccacggtgctgatcaacagcccgtaccccgccgaggacgtctggggccatctgccggccccgatgcagaagaagatcatcgacctcgacctgcaggtgtatgcgatcgacgccggtgaggtggcccgttcggtgggcctgggcaaccgcaccaacacggtgctgcagacctgctacttcaagatcagtggcgtgcttcccgaggaccacgcgatcgaggccatcaagaactcgatcaccaagacctacgcgaagaagtcgatggagatcgtggagaagaaccacgccgccgtcgacgccgccctggagcacctgcacaagatcgacgtgccggccaaggtcacctccaccgaggactacctgccgcccgtgccgtcgttcgcgcctgacttcgtcaaggacgtcaccgcggccatgatgaccgagcagggcgagtcgctgccggtgagcaagctgccggccgatggttcgttcccctcgggcaccacgcagtacgagaagcgcaatgtgtccgagatcatcgcggtctgggaccaggacaactgcatccagtgcggcaactgcgccttcgtctgcccgcacggcgtgctgagggccaagtactacaagcccgatgtgctcgacgatgcgccgaagtcgttccaggcggttccgctgaatgcggccggcctgcccgacgagatgtacaccctgcaggtgttcgccgaggactgcaccggttgtggcctgtgcgtcgaggcctgccccgtgcatcccatcggtggcgaccccgaatgcaaggcgatcaacctggattccgtgctcgaccgcaccaacgagcgggcgaacgtggagttcttccagaagatccccgagcccccgcgcacccgcgtgaactacggtgccgtgcgtggcgcccagttcctgcagccgctgttcgagttcagcggtgcctgcccgggttgtggcgagacgccgtacctcaagctgctcacccagctgttcggcgaccgcgccaccgtggcgaatgccaccggctgctcgtccatctacggcggcaacctgccgaccaccccgtgggcgaagaacaaggagggacgcggcccggcctggagcaactcattgttcgaggacaacgccgagttcggccttggcatgcgcctggcggccgacctgcacaacgaactggcccgtcagcgcgttgacgagctgtccgatgcgatcaacgaccccgagctggtcgatcagctgctgaacgccccgcaggcgcaggagtccgatctgcacgcccaggccgagcgcgtcgacgccctgcaggatcgcctgaccgacctggtcaacgatccgaacgtggacgccgacaccaaggccaaggtcgaggacctgcggtcggtggccgacaacctgctgcgtcgttccgtgtggatcgtcggcggcgacggttgggcctacgacatcggttcgggcggccttgaccatgtgctgtccaccggacgcaatgtcaatgtgctggtgctcgacaccgaggtctactccaataccggtggccaggcctcgaagtcgtcgcccatgggtgcgatcgcgaagttcgcgaccgccggcaagcgcacgaacaagaaggacatcgccatgcaggccgtgtcctacggcgacgtctatgtcgcccgcgtggcgttcggtgccgacccggagcagacgctgaaggcattccgtgaggccgaggcctaccccggccccagcctgatcatcgcctacagccactgcatcagccatggctacaacctgcgcaagggcctggaccagcagtacaaggcagtggcctccggtcactggccgctgatccggtacaacccggaggttcgcgactcgggtggcaacccgttcctgctcgactcggcccgtccgcgcatctcgctgatggactaccgcaagaccgagctgcgcttcaagatgctgatggtcaaggatccggaagaggccaagcacctcaatgacctcagccaggagcaggtgaccaggcgtttcgccgactacgaggaaatggcctcacgtccggccgagatgttcgccaccgacgcacggagggatgtctga

SEQ ID NO: 61 - protein, 1255 aa, Propionibacterium freudenreichii
MTTTTRGPVPGSNGMPANPGLSGEAATATPSPVDVAAGAKDAADELAQSRREQDITHQMICDGNTAASDVAFRINELCSIYPITPSSPMAELADEWSARDRMNIWGQVPHVMEMQSEAGAAGAMHGSLQGGALATTFTASQGLLLMIPNMYKIAGELTSTVMHVAARSLATQGLSIFGDHQDVMACRQTGWAMLCSTGVQQCHDNALISQVATLRSRVPFMHFFDGFRTSHELNTCIQLTDDQLRSMVPDALVREHRERALSPDNPFIRGTAQNADVYFQGREAGNKYYDSVPGIVQDAMDEFAAMTGRQYHLADYYGAPDADRVIVIMGSGAETVQQTVSKLNEQGEKVGLVVIRLYRPFPTQAVLDCIPASVKKIAVLDRTKEPGSNGEPLFLDVVSAVSEAYSNGERDNLPAIIGGRYGLSSKEFTPGMCAAVYDELAKDKPKRRFTVGITDDVTHLSIPWDASLDLEDPETSRAVFYGIGADGTVGANKNTIKILGSEPGTYAQGYFVYDSKKSGGRTTSHLRFGPDPIKAPYLVNQAGFIGVHHWADLERIDVLAFARKGTTVLINSPYPAEDVWGHLPAPMQKKIIDLDLQVYAIDAGEVARSVGLGNRTNTVLQTCYFKISGVLPEDHAIEAIKNSITKTYAKKSMEIVEKNHAAVDAALEHLHKIDVPAKVTSTEDYLPPVPSFAPDFVKDVTAAMMTEQGESLPVSKLPADGSFPSGTTQYEKRNVSEIIAVWDQDNCIQCGNCAFVCPHGVLRAKYYKPDVLDDAPKSFQAVPLNAAGLPDEMYTLQVFAEDCTGCGLCVEACPVHPIGGDPECKAINLDSVLDRTNERANVEFFQKIPEPPRTRVNYGAVRGAQFLQPLFEFSGACPGCGETPYLKLLTQLFGDRATVANATGCSSIYGGNLPTTPWAKNKEGRGPAWSNSLFEDNAEFGLGMRLAADLHNELARQRVDELSDAINDPELVDQLLNAPQAQESDLHAQAERVDALQDRLTDLVNDPNVDADTKAKVEDLRSVADNLLRRSVWIVGGDGWAYDIGSGGLDHVLSTGRNVNVLVLDTEVYSNTGGQASKSSPMGAIAKFATAGKRTNKKDIAMQAVSYGDVYVARVAFGADPEQTLKAFREAEAYPGPSLIIAYSHCISHGYNLRKGLDQQYKAVASGHWPLIRYNPEVRDSGGNPFLLDSARPRISLMDYRKTELRFKMLMVKDPEEAKHLNDLSQEQVTRRFADYEEMASRPAEMFATDARRDV

SEQ ID NO: 62 - DNA, 3600 bp, Synechocystis PCC6803
  CDS (1)..(3600): nifJ gene from Synechocystis sp. PCC 6803 encoding pyruvate-flavodoxin/ferredoxin oxidoreductase
atgagtttacctacctatgccaccctcgacggtaatgaagcggtggcccgtgtggcctacctgctcagtgaagtgattgccatttatcccatcaccccttcctcgcccatgggggaatggtccgatgcttgggcagcagaacaccggcccaatttgtggggcaccgtaccattggtggtggaaatgcaaagcgaggggggagccgccggtactgtccatggcgctctgcaatcgggagctttgaccacaacatttaccgcttcccagggcttaatgttgatgttgcccaatatgcacaaaattgctggggaattaacagccatggttttgcatgtggcggcccgttctttagcggcccagggcctatctatttttggggatcacagtgatgtgatggcggccagaaatacgggctttgccatgttaagttccaattctgtccaggaagcccacgattttgccctcattgccacggccaccagctttgccaccaggataccgggactgcacttttttgatggttttcgcacttcccacgaagaacaaaaaattgagcttttaccccaggaagtactccgtggtttgattaaggatgaggatgtgctagcccaccggggacgggctttgacccccgatcgcccgaagttgcgggggacggcccaaaatccggatgtctatttccaagctagggaaacggttaatcccttttatgccagttatcccaacgtgctggagcaggtgatggaacaatttggccagctaaccggccgccattaccgtccctatgaatattgtggccatccggaagcggaacgggtgattgtgctgatgggttctggtgcggaaacggcccaggaaacggtggattttctaactgcccaaggggaaaaggttggtttactgaaagtacgcctctatcggccctttgctggcgatcgcctggttaatgctctaccaaaaacggtgcaaaaaatagcggtgctggaccggtgtaaggaaccggggagcattggggaacccctctatcaggatgtgctgacggccttttttgaagcgggcatgatgccgaaaattattggtggccgttacggtctgtcatccaaggaatttacccccgccatggttaaaggggtgttggaccatttaaatcaaaccaaccccaaaaaccatttcaccgtaggcattaacgatgatttgagccacaccagcatcgactatgaccccagtttttccacggaagcagattctgtcgtccgggcaattttctacggtctcggttccgacggtacggtgggggccaataagaactccatcaaaatcattggcgaagatacggataactacgcccagggttattttgtttacgactcgaaaaaatccggttctgtaaccgtttcccatctgcgctttggccctaatcccatcctgtccacttacctgattagccaagccaattttgtcgcctgtcaccagtgggaatttttggaacagtttgaagtcttggaaccagccgttgatggcggcgttttcctggtcaatagcccctacggcccagaggaaatttggcgagagtttccccgcaaagtacaacaggaaattattgacaaaaatctcaaggtttacaccatcaatgccaatgacgtagccagggatgcgggcatgggccgccgcaccaacacagtcatgcaaacctgtttctttgccctagcgggagtgttaccccgggaagaggcgatcgccaaaattaagcagtcggtccaaaaaacctacggcaaaaagggtcaggaaattgtcgagatgaatattaaagcggtggattccaccctggcccatctctatgaagtgtccgtaccggaaacggtgagcgacgatgcccctgctatgcggccggtggtgcctgataacgccccggtgtttgtgcgggaagtgttaggaaaaatcatggcccggcaaggggatgatctcccggtcagtgctttaccctgcgatggcacctatcccaccgccactacccaatgggaaaaacgcaacgtgggccacgaaattcccgtttgggaccccgatgtttgtgtgcaatgcggcaaatgcgtcattgtttgtccccatgctgtgattcggggcaaagtttacgaggaggcagaattggccaatgctccggtcagtttcaaatttaccaatgccaaagaccatgattggcaaggttctaagttcaccatccaggtagccccggaagattgcaccggttgcggcatctgtgtggacgtatgcccggctaaaaataaatcccagcctcgtttaagggcgattaatatggctccccagttacccttgcgggaacaggaacgggagaattgggactttttcctagatttgcccaaccccgatcgcctcagtttgaatttgaacaaaatcagccatcaacagatgcaggagccgttatttgaattttctggagcctgtgccggttgtggggaaaccccttatttgaaactggtcagtcaattatttggcgatcgcatgttagtggccaacgccaccggttgctcttccatctatggcggcaacttaccgacaactccctgggcccaaaatgctgagggtcgcggtcccgcttggtccaattccctgtttgaagataacgctgaatttggccttggtttccgagtggcgatcgacaagcaaacggaatttgcaggggaattgctaaaaacctttgctggggagttgggagacagtttggtaagtgaaattctcaacaatgcccaaaccactgaagcggatatttttgaacaacggcaattggtagaacaggttaagcaacgtttgcaaaatctggaaactccccaagcccaaatgttcctttctgtagcggattacctcgtgaagaaaagcgtttggattattggtggcgatggctgggcctacgacattgggtacggcggtttggatcacgtcctcgccagtgggcgtaatgtcaatatcttggtgatggatacggaagtctattccaacaccgggggccaagcctccaaagccactccccgggccgctgtagctaaattcgccgctgggggtaaaccctctcccaaaaaagatttgggcttaatggccatgacctacggcaacgtctatgtggccagtatcgccatgggagccaaaaatgagcagtccattaaagcctttatggaagcggaagcctatcccggtgtctcgttaattattgcctactcccactgcattgcccacggcattaatatgaccaccgcgatgaaccatcaaaaagagttggtggacagcggtcgttggttgctctaccgctataaccctttgttggcggatgaaggtaaaaatcccctgcaattggatatgggatcgccaaaagtagccattgacaaaacggtctattcggaaaatcgctttgccatgctcacccgcagtcaaccagaggaggccaaacgcttaatgaagttagctcaaggggatgtgaacactcgctgggccatgtacgaatatctggcgaaacgttctctgggtggggaaattaacggtaacaaccatggtgtttccccatctccggaggtaattgctaaatctgtttag

SEQ ID NO: 63 - protein, 1199 aa, Synechocystis PCC6803
MSLPTYATLDGNEAVARVAYLLSEVIAIYPITPSSPMGEWSDAWAAEHRPNLWGTVPLVVEMQSEGGAAGTVHGALQSGALTTTFTASQGLMLMLPNMHKIAGELTAMVLHVAARSLAAQGLSIFGDHSDVMAARNTGFAMLSSNSVQEAHDFALIATATSFATRIPGLHFFDGFRTSHEEQKIELLPQEVLRGLIKDEDVLAHRGRALTPDRPKLRGTAQNPDVYFQARETVNPFYASYPNVLEQVMEQFGQLTGRHYRPYEYCGHPEAERVIVLMGSGAETAQETVDFLTAQGEKVGLLKVRLYRPFAGDRLVNALPKTVQKIAVLDRCKEPGSIGEPLYQDVLTAFFEAGMMPKIIGGRYGLSSKEFTPAMVKGVLDHLNQTNPKNHFTVGINDDLSHTSIDYDPSFSTEADSVVRAIFYGLGSDGTVGANKNSIKIIGEDTDNYAQGYFVYDSKKSGSVTVSHLRFGPNPILSTYLISQANFVACHQWEFLEQFEVLEPAVDGGVFLVNSPYGPEEIWREFPRKVQQEIIDKNLKVYTINANDVARDAGMGRRTNTVMQTCFFALAGVLPREEAIAKIKQSVQKTYGKKGQEIVEMNIKAVDSTLAHLYEVSVPETVSDDAPAMRPVVPDNAPVFVREVLGKIMARQGDDLPVSALPCDGTYPTATTQWEKRNVGHEIPVWDPDVCVQCGKCVIVCPHAVIRGKVYEEAELANAPVSFKFTNAKDHDWQGSKFTIQVAPEDCTGCGICVDVCPAKNKSQPRLRAINMAPQLPLREQERENWDFFLDLPNPDRLSLNLNKISHQQMQEPLFEFSGACAGCGETPYLKLVSQLFGDRMLVANATGCSSIYGGNLPTTPWAQNAEGRGPAWSNSLFEDNAEFGLGFRVAIDKQTEFAGELLKTFAGELGDSLVSEILNNAQTTEADIFEQRQLVEQVKQRLQNLETPQAQMFLSVADYLVKKSVWIIGGDGWAYDIGYGGLDHVLASGRNVNILVMDTEVYSNTGGQASKATPRAAVAKFAAGGKPSPKKDLGLMAMTYGNVYVASIAMGAKNEQSIKAFMEAEAYPGVSLIIAYSHCIAHGINMTTAMNHQKELVDSGRWLLYRYNPLLADEGKNPLQLDMGSPKVAIDKTVYSENRFAMLTRSQPEEAKRLMKLAQGDVNTRWAMYEYLAKRSLGGEINGNNHGVSPSPEVIAKSV

SEQ ID NO: 64 - DNA, 531 bp, Escherichia coli
  CDS (1)..(531): fldA gene from E. coli encoding flavodoxin
atggctatcactggcatctttttcggcagcgacaccggtaataccgaaaatatcgcaaaaatgattcaaaaacagcttggtaaagacgttgccgatgtccatgacattgcaaaaagcagcaaagaagatctggaagcttatgacattctgctgctgggcatcccaacctggtattacggcgaagcgcagtgtgactgggatgacttcttcccgactctcgaagagattgatttcaacggcaaactggttgcgctgtttggttgtggtgaccaggaagattacgccgaatatttctgcgacgcattgggcaccatccgcgacatcattgaaccgcgcggtgcaaccatcgttggtcactggccaactgcgggctatcatttcgaagcatcaaaaggtctggcagatgacgaccactttgtcggtctggctatcgacgaagaccgtcagccggaactgaccgctgaacgtgtagaaaaatgggttaaacagatttctgaagagttgcatctcgacgaaattctcaatgcctga

SEQ ID NO: 65 - protein, 176 aa, Escherichia coli
MAITGIFFGSDTGNTENIAKMIQKQLGKDVADVHDIAKSSKEDLEAYDILLLGIPTWYYGEAQCDWDDFFPTLEEIDFNGKLVALFGCGDQEDYAEYFCDALGTIRDIIEPRGATIVGHWPTAGYHFEASKGLADDDHFVGLAIDEDRQPELTAERVEKWVKQISEELHLDEILNA

SEQ ID NO: 66 - DNA, 522 bp, Escherichia coli
  CDS (1)..(522): fldB gene from E. coli encoding flavodoxin
atgaatatgggtcttttttacggttccagcacctgttacaccgaaatggcggcagaaaaaatccgcgatattatcggcccagaactggtgaccttacataacctcaaggacgactccccgaaattaatggagcagtacgatgtgctcattctgggtatcccgacctgggattttggtgaaatccaggaagactgggaagccgtctgggatcagctcgacgacctgaaccttgaaggtaaaattgttgcgctgtatgggcttggcgatcaactgggatacggcgagtggttcctcgatgcgctcggtatgctgcatgacaaactctcgaccaaaggcgtgaagttcgtcggctactggccaacggaaggatatgaatttaccagcccgaaaccggtgattgctgacgggcaactgttcgtgggtctggcgctggatgaaactaaccagtatgaccttagcgacgagcgtattcagagctggtgcgagcaaatcctcaacgaaatggcagagcattacgcctga

SEQ ID NO: 67 - protein, 173 aa, Escherichia coli
MNMGLFYGSSTCYTEMAAEKIRDIIGPELVTLHNLKDDSPKLMEQYDVLILGIPTWDFGEIQEDWEAVWDQLDDLNLEGKIVALYGLGDQLGYGEWFLDALGMLHDKLSTKGVKFVGYWPTEGYEFTSPKPVIADGQLFVGLALDETNQYDLSDERIQSWCEQILNEMAEHYA

SEQ ID NO: 68 - DNA, 477 bp, Bacillus subtilis
  CDS (1)..(477): ykuN gene from Bacillus subtilis encoding flavodoxin
atggctaaagccttgattacatatgccagcatgtcaggaaatacagaagacattgccttcataataaaagatacgcttcaggaatatgagttggatatcgattgtgtcgagataaatgatatggatgcgtcttgtttaacctcctatgattatgtactgattggcacctatacatggggggacggcgatttgccctacgaagcggaggattttttcgaagaggtcaaacagattcagcttaatggtttaaaaacagcctgcttcgggtctggcgattattcttatccaaagttttgcgaagcggtgaatttgttcaatgtcatgctgcaagaggcgggagctgctgtttaccaggaaacactaaaaattgaattagcgcctgaaacagatgaagatgtggaaagctgccgagcgtttgcgagaggttttcttgcatgggcagattatatgaacaaggaaaaaatccatgtttcataa

SEQ ID NO: 69 - protein, 158 aa, Bacillus subtilis
MAKALITYASMSGNTEDIAFIIKDTLQEYELDIDCVEINDMDASCLTSYDYVLIGTYTWGDGDLPYEAEDFFEEVKQIQLNGLKTACFGSGDYSYPKFCEAVNLFNVMLQEAGAAVYQETLKIELAPETDEDVESCRAFARGFLAWADYMNKEKIHVS

SEQ ID NO: 70 - DNA, 513 bp, Synechocystis PCC6803
  CDS (1)..(513): isiB gene from Synechocystis encoding flavodoxin
atgacaaaaattggacttttttacggtactcaaaccggcaacactgaaaccattgctgaactgattcaaaaagaaatgggcggcgatagtgtggtcgatatgatggatatatcccaggctgatgttgatgattttaggcaatatagttgcctgattatcggttgtcccacctggaatgtgggggaactccagagtgattgggaaggcttttatgaccaattagacgaaattgattttaatggcaaaaaagtagcctattttggtgctggcgatcaggttggttatgcagataattttcaagacgccatgggcattttagaagaaaaaatcagtggattaggcggtaaaacagtggggttttggcccaccgctggctatgattttgacgaatcaaaagcggtgaaaaatgggaaatttgttggtttagctttggacgaagataatcagccagagttaacagaattaagagtaaagacatgggtaagtgaaattaaaccaattttgcaatcctag

SEQ ID NO: 71 - protein, 170 aa, Synechocystis PCC6803
MTKIGLFYGTQTGNTETIAELIQKEMGGDSVVDMMDISQADVDDFRQYSCLIIGCPTWNVGELQSDWEGFYDQLDEIDFNGKKVAYFGAGDQVGYADNFQDAMGILEEKISGLGGKTVGFWPTAGYDFDESKAVKNGKFVGLALDEDNQPELTELRVKTWVSEIKPILQS

SEQ ID NO: 72 - DNA, 585 bp, Streptomyces venezuelae
  CDS (1)..(585): wrbA gene from Streptomyces venezuelae encoding flavodoxin
atgaccacccccgtcgtctccatcgcctaccactccggctacggccacaccgcggtcctggccgaggccgtccgtgacggcgccgccgacgcgggcgccaccgtccacctgatcaaggtcgacgggatcaccgaggcggagtgggagctgctcgacgcctccgacgcgatcgtcttcggctccccgacctacatgggcaccgcctccggtgccttccaccagttcgccgaggactcctcgaagcgctggttcggcgacgtctggctggacaagctcgccgccggcttcaccaactccggctccaagagcggcgacaagctgcacaccctgcagtacttccagatcctcgccggccagcacggcatgcactgggtcaacctcggcctgaagcccggctggaacaccagcgaggcctccgagaacgacatcaaccgcctcggcttcttctccggcgccgccggccagacccccgcggacctgggccccgaggccgtccacaaggccgacgtcgccaccgccgaacacctcggccgccgcgtcgccgagaccgcccgcaccttcgcggccggcaaggccgccgcctga

SEQ ID NO: 73 - protein, 194 aa, Streptomyces venezuelae
MTTPVVSIAYHSGYGHTAVLAEAVRDGAADAGATVHLIKVDGITEAEWELLDASDAIVFGSPTYMGTASGAFHQFAEDSSKRWFGDVWLDKLAAGFTNSGSKSGDKLHTLQYFQILAGQHGMHWVNLGLKPGWNTSEASENDINRLGFFSGAAGQTPADLGPEAVHKADVATAEHLGRRVAETARTFAAGKAAA

SEQ ID NO: 74 - DNA, 459 bp, Methanococcus aeolicus
  CDS (1)..(459): PRK06242 gene from Methanococcus aeolicus encoding flavodoxin
atgaaaatattaattatttgtaaatccgtacaccatggaaacactaaaaaaatagcagatgccatggcagaggttttaaatgcagaggttattgcacctgaaaatgtaagttccgaagatatcaaaaaatatgatttggtgggatttggctctggaatatatattgggaaacatcataaaaagctattaaaacttgcggataatcttccaaatggagaaaataaaacagtatttgtattttccacaagcgataactggaagcaaaattaccataagccattaatggataaactaaattccagaggatataaaacagtaggagaattcaactgtaaagggtttgatgactggtttatatttaaattaattggtggtagaaataaaggacatccaaataaaaaagatattgaaaatgcaaaaaaatttgctgaaaatataaagaatatagaaaatatatag

SEQ ID NO: 75 - protein, 152 aa, Methanococcus aeolicus
MKILIICKSVHHGNTKKIADAMAEVLNAEVIAPENVSSEDIKKYDLVGFGSGIYIGKHHKKLLKLADNLPNGENKTVFVFSTSDNWKQNYHKPLMDKLNSRGYKTVGEFNCKGFDDWFIFKLIGGRNKGHPNKKDIENAKKFAENIKNIENI

SEQ ID NO: 76 - DNA, 336 bp, Escherichia coli
  CDS (1)..(336): fdx gene from E. coli encoding ferredoxin
atgccaaagattgttattttgcctcatcaggatctctgccctgatggcgctgttctggaagctaatagcggtgaaaccattctcgacgcagctctgcgtaacggtatcgagattgaacacgcctgtgaaaaatcctgtgcttgcaccacctgccactgcatcgttcgtgaaggttttgactcactgccggaaagctcagagcaggaagacgacatgctggacaaagcctggggactggagccggaaagccgtttaagctgccaggcgcgcgttaccgacgaagatttagtagtcgaaatcccgcgttacactatcaaccatgcgcgtgagcattaa

SEQ ID NO: 77 - protein, 111 aa, Escherichia coli
MPKIVILPHQDLCPDGAVLEANSGETILDAALRNGIEIEHACEKSCACTTCHCIVREGFDSLPESSEQEDDMLDKAWGLEPESRLSCQARVTDEDLVVEIPRYTINHAREH

SEQ ID NO: 78 - DNA, 249 bp, Bacillus subtilis
  CDS (1)..(249): fer gene from B. subtilis encoding ferredoxin
atggcaaagtacacaatcgtagacaaagatacatgtattgcatgcggcgcttgcggagctgctgcaccagacatttacgattacgatgatgaaggcatcgcgttcgtaacgcttgatgaaaacaaaggtgttgtcgaagttcctgaggtactggaagaagatatgattgacgcatttgaaggatgccctactgattccatcaaagtggcggatgagccatttgaaggcgacccgcttaaatttgaatag

SEQ ID NO: 79 - protein, 82 aa, Bacillus subtilis
MAKYTIVDKDTCIACGACGAAAPDIYDYDDEGIAFVTLDENKGVVEVPEVLEEDMIDAFEGCPTDSIKVADEPFEGDPLKFE

SEQ ID NO: 80 - DNA, 321 bp, Corynebacterium glutamicum
  CDS (1)..(321): fdxB gene from Corynebacterium glutamicum encoding ferredoxin
atgtctactattcatttcattgatcatgctggcaaaacccgcaccatcgaggcgactgttggtgattcagtaatggagaccgcagtccgaaacggagtgcctggaattgttgctgaatgcggcggttccttatcgtgtgcaacctgccatgtgtttgttgaccctgcacagtatgatgcgcttcccccaatggaggagatggaagatgaaatgctgtggggtgctgccgtggaccgtgaggattgctcccgtttgtcttgccaaatcaaggtcaccgaaggcatggatctttcgttgaccacgccagaaacgcaagtgtga

SEQ ID NO: 81 - protein, 106 aa, Corynebacterium glutamicum
MSTIHFIDHAGKTRTIEATVGDSVMETAVRNGVPGIVAECGGSLSCATCHVFVDPAQYDALPPMEEMEDEMLWGAAVDREDCSRLSCQIKVTEGMDLSLTTPETQV

SEQ ID NO: 82 - DNA, 561 bp, Synechocystis PCC6803
  CDS (1)..(561): fdx gene from Synechocystis encoding ferredoxin
atgaccatgccaccattatggaattgctctgtcgccaacagggttaatgccattgttgccagtactaaggaggattgtgtggctaaaactattaagctcgaccccattgatttaaaagtcgccatcgagaccaacgataacctgctctcggggttgctcggtcaggatttacggatcatgaaggagtgtggtggtcggggtatgtgtgccacttgtcacgtttacatcaccgctgggatggagagtctttctcccctcaaccgtcgggagcagcgcaccctagaggtgatcaccacccacaatcgttattcccgtttggcttgccaagcccgggtgttggatgaaggcgtggtggtggaattgcccgctgggatgtacgtcagtgaaattgaggacatcgaggagctgattggccgtcgagcggaggaaaatattctcaatcctcgggatgggagcatcctagtggaaaaaggtaagttaattacccgttccatgattagtcaactagatgaccagttacaggcggccaaaattcagattgtcaacgataccgatgaataa

SEQ ID NO: 83 - protein, 186 aa, Synechocystis PCC6803
MTMPPLWNCSVANRVNAIVASTKEDCVAKTIKLDPIDLKVAIETNDNLLSGLLGQDLRIMKECGGRGMCATCHVYITAGMESLSPLNRREQRTLEVITTHNRYSRLACQARVLDEGVVVELPAGMYVSEIEDIEELIGRRAEENILNPRDGSILVEKGKLITRSMISQLDDQLQAAKIQIVNDTDE

SEQ ID NO: 84 - DNA, 294 bp, Streptomyces venezuelae
  CDS (1)..(294): SVEN_7039 gene from Streptomyces venezuelae encoding ferredoxin
atggcgtacgtcgtcaccgacgagtgcatcggctgcaagtacacggactgtgtggacgtctgccccgtgagctgtttccacgagggccccgagatgctctacatcaaccccgaggaatgcatcgactgcaacgcgtgcgtcgccgagtgcccgcccgaggccatctgggcggacgtcgacctgccggaggacaagctccagtggatcgagatcaacggagagatgagtgccaagtacccggttctccacgagagccggggcccccacggacagccctccagccagccttcctga

SEQ ID NO: 85 - protein, 97 aa, Streptomyces venezuelae
MAYVVTDECIGCKYTDCVDVCPVSCFHEGPEMLYINPEECIDCNACVAECPPEAIWADVDLPEDKLQWIEINGEMSAKYPVLHESRGPHGQPSSQPS

SEQ ID NO: 86 - DNA, 1746 bp, Methanococcus aeolicus
  CDS (1)..(1746): fdx gene from Methanococcus aeolicus encoding ferredoxin
atggggggtgttatgatgtataatattacatacataaaagaggatggaactaaaaaatcaattaaagttaaagaaggaaccacaatacttgaaggagcgataaaagcgggagtttatattgatgctccatgtggaacggggaaatgtggtaagtgtaaagttttagtggagaaaggtttagaaaatattgataaggatagtattgtggaagatgagtatgcactggcatgtgtggcaaaagtttatggggacatatcaattaatgttccaaatttccaaggtgtggtttgtaaggatatcaccaacgaagttggtgagctacaaactcgaagagtttgttcaattaccgaacaatgtaaaggtgagctacaaaatctcgagggatttcatccgatgtctttaaaccccgatattggaataaataaaattactacaacagtattggaatcatctaactataacctaacattagatgcaataaataagcttaattctatgaagttatcggacgaagtaactttaatattaaagggagataatgtcgttaatgtagaaaaagatttttctggaatttatgggctttcaattgatattgggactacatctgttgttgtatatcttgttgatatttctaaaggtattgttttagataatatttcttttttaaatcctcagaggcagtttggggcagatgttgtttcaagaatagcatacaacaacggaattttactgcaaaaaacacttataactgaattaaacgattctatatcaaaattatgttcaaacaataacataaaaatggataatatttatgaagttagtgtggtaggaaacactgctatgatacacttcttttatggaatagtcccaaaaaatcttgcaacccatccttatgttccaacatttaaaaactcaccatatcttcctgcaaaagagttggggctaaacctaagaaacgcatacatttacacacttccgataataggaggttatgttggggcagacacagttggagcaattttatcatctgaaatgcataaaaaagatgatataagtctccttatagatattggcacaaatggggaaattgttttagggaataaagaaaagttattaacctgttcatgtgcagcaggtcctgcatttgagggtgtcagcatagagcatgggacaaatgctagagagggggcagtatgtagagtaaaaatagatgaaaataacatatactatgagaccataggaaataaaacgccccctattggaatatgcgggtctggaataatagatattgtagctgaatttttaaaatccggattaattaataaaaccggtagatttactggagaacataaaaacttaaaggaaaataaatttatcattgaagattctatttatttcacacagggcgatattagggaagtacagcttgcaaaaggggcaatatatgcaggaataaaaattctctgttatgaatatggaataagtatggaagatatatctaatgtatatgttactggagcatttggatgtcatatcgatgttgaaaatgcaaagattatcggacttttaccggatttggataatatattgagtattgataatgctgctggaagggggactataatggctttactatctaaaaaaattagaaatgaagccgataagttggcaaaaaatacgaaatatattgaattaagtagtcatgataattttgaaagtgagttcatatctgcccttgggttttaa

SEQ ID NO: 87 - protein, 581 aa, Methanococcus aeolicus
MGGVMMYNITYIKEDGTKKSIKVKEGTTILEGAIKAGVYIDAPCGTGKCGKCKVLVEKGLENIDKDSIVEDEYALACVAKVYGDISINVPNFQGVVCKDITNEVGELQTRRVCSITEQCKGELQNLEGFHPMSLNPDIGINKITTTVLESSNYNLTLDAINKLNSMKLSDEVTLILKGDNVVNVEKDFSGIYGLSIDIGTTSVVVYLVDISKGIVLDNISFLNPQRQFGADVVSRIAYNNGILLQKTLITELNDSISKLCSNNNIKMDNIYEVSVVGNTAMIHFFYGIVPKNLATHPYVPTFKNSPYLPAKELGLNLRNAYIYTLPIIGGYVGADTVGAILSSEMHKKDDISLLIDIGTNGEIVLGNKEKLLTCSCAAGPAFEGVSIEHGTNAREGAVCRVKIDENNIYYETIGNKTPPIGICGSGIIDIVAEFLKSGLINKTGRFTGEHKNLKENKFIIEDSIYFTQGDIREVQLAKGAIYAGIKILCYEYGISMEDISNVYVTGAFGCHIDVENAKIIGLLPDLDNILSIDNAAGRGTIMALLSKKIRNEADKLAKNTKYIELSSHDNFESEFISALGF

SEQ ID NO: 88 - DNA, 720 bp, Artificial Sequence
  CDS (1)..(720): Synthetic gpf gene encoding GFP
atgcgtaaaggcgaagagctgttcactggtgtcgtccctattctggtggaactggatggtgatgtcaacggtcataagttttccgtgcgtggcgagggtgaaggtgacgcaactaatggtaaactgacgctgaagttcatctgtactactggtaaactgccggtaccttggccgactctggtaacgacgctgacttatggtgttcagtgctttgctcgttatccggaccatatgaagcagcatgacttcttcaagtccgccatgccggaaggctatgtgcaggaacgcacgatttcctttaaggatgacggcacgtacaaaacgcgtgcggaagtgaaatttgaaggcgataccctggtaaaccgcattgagctgaaaggcattgactttaaagaagacggcaatatcctgggccataagctggaatacaattttaacagccacaatgtttacatcaccgccgataaacaaaaaaatggcattaaagcgaattttaaaattcgccacaacgtggaggatggcagcgtgcagctggctgatcactaccagcaaaacactccaatcggtgatggtcctgttctgctgccagacaatcactatctgagcacgcaaagcgttctgtctaaagatccgaacgagaaacgcgatcatatggttctgctggagttcgtaaccgcagcgggcatcacgcatggtatggatgaactgtacaaatgatga

SEQ ID NO: 89 - protein, 238 aa, Artificial Sequence
MRKGEELFTGVVPILVELDGDVNGHKFSVRGEGEGDATNGKLTLKFICTTGKLPVPWPTLVTTLTYGVQCFARYPDHMKQHDFFKSAMPEGYVQERTISFKDDGTYKTRAEVKFEGDTLVNRIELKGIDFKEDGNILGHKLEYNFNSHNVYITADKQKNGIKANFKIRHNVEDGSVQLADHYQQNTPIGDGPVLLPDNHYLSTQSVLSKDPNEKRDHMVLLEFVTAAGITHGMDELYK

SEQ ID NO: 90 - DNA, 1486 bp, Escherichia coli
  promoter (1)..(36): apFAB306 promoter
  CDS (73)..(603): fldA gene encoding flavodoxin
  CDS (620)..(1366): flpr gene encoding flavodoxin/ferredoxin reductase
  terminator (1400)..(1486)
ttgacaattaatcatccggctcgtagtgtttgtggatggcagtggctagcggccgcagaggttatttcactcatggctatcactggcatctttttcggcagcgacaccggtaataccgaaaatatcgcaaaaatgattcaaaaacagcttggtaaagacgttgccgatgtccatgacattgcaaaaagcagcaaagaagatctggaagcttatgacattctgctgctgggcatcccaacctggtattacggcgaagcgcagtgtgactgggatgacttcttcccgactctcgaagagattgatttcaacggcaaactggttgcgctgtttggttgtggtgaccaggaagattacgccgaatatttctgcgacgcattgggcaccatccgcgacatcattgaaccgcgcggtgcaaccatcgttggtcactggccaactgcgggctatcatttcgaagcatcaaaaggtctggcagatgacgaccactttgtcggtctggctatcgacgaagaccgtcagccggaactgaccgctgaacgtgtagaaaaatgggttaaacagatttctgaagagttgcatctcgacgaaattctcaatgcctgaaaaacaggagaaaaacatggctgattgggtaacaggcaaagtcactaaagtgcagaactggaccgacgccctgtttagtctcaccgttcacgcccccgtgcttccgtttaccgccgggcaatttaccaagcttggccttgaaatcgacggcgaacgcgtccagcgcgcctactcctatgtaaactcgcccgataatcccgatctggagttttacctggtcaccgtccccgatggcaaattaagcccacgactggcggcactgaaaccaggcgatgaagtgcaggtggttagcgaagcggcaggattctttgtgctcgatgaagtgccgcactgcgaaacgctatggatgctggcaaccggtacagcgattggcccttatttatcgattctgcaactaggtaaagatttagatcgcttcaaaaatctggtcctggtgcacgccgcacgttatgccgccgacttaagctatttgccactgatgcaggaactggaaaaacgctacgaaggaaaactgcgcattcagacggtggtcagtcgggaaacggcagcggggtcgctcaccggacggataccggcattaattgaaagtggggaactggaaagcacgattggcctgccgatgaataaagaaaccagccatgtgatgctgtgcggcaatccacagatggtgcgcgatacacaacagttgctgaaagagacccggcagatgacgaaacatttacgtcgccgaccgggccatatgacagcggagcattactggtaatagcttcatatggtccacaggacactcgttgctttcaccatgcgtaaagcaatcagatacccagcccgcctaatgagcgggcttttttttgaacaaaattagagaataacaatgcaaaca

SEQ ID NO: 91 - protein, 176 aa, Escherichia coli; identical to SEQ ID NO: 65

SEQ ID NO: 92 - protein, 248 aa, Escherichia coli; identical to SEQ ID NO: 43

SEQ ID NO: 93 - DNA, 36 bp, Artificial Sequence
  promoter (1)..(36): apFAB309 promoter
ttgacaattaatcatccggctcgtagtgtctgtgga

SEQ ID NO: 94 - DNA, 75 bp, Artificial Sequence
  terminator (1)..(75): rrnb terminator
caaataaaacgaaaggctcagtcgaaagactgggcctttcgttttatctgttgtttgtcggtgaacgctctcctg

SEQ ID NO: 95 - DNA, 1374 bp, Escherichia coli
  CDS (1)..(1374): HemN gene derived from E. coli
atgtctgtacagcaaatcgactgggatctggccctgatccagaaatataactattccgggccacgatacacctcgtacccgaccgcgctggagttttcagaagacttcggcgaacaggcgtttttacaagccgtggcgcgctatcctgagcgtccattatctctctacgtacatatcccgttctgccataagctttgttacttctgcggttgcaataagattgttactcgccagcagcacaaggccgatcagtatctggacgcgctggagcaagaaatcgtccatcgtgcaccgctgttcgccgggcgtcacgtcagccaattgcactggggcggcggaacgccgacgtatctgaataaagcgcaaatcagccgcctgatgaagctgctgcgcgaaaacttccagttcaatgccgatgcggagatttcgatcgaagtcgatccgcgggaaatcgaactggatgtactcgatcatttacgcgccgaaggctttaatcgcctgagcatgggcgtgcaggacttcaacaaagaagtgcaacgtctggttaaccgcgagcaggatgaagagttcatctttgcactgcttaaccatgcgcgtgagattggttttacctccaccaacatcgacctgatttacggcctgccgaaacagacgccggagagtttcgcctttaccctgaaacgtgtggcggagctgaaccccgatcgtctgagtgtctttaactacgcgcatctgccgaccatttttgctgctcagcgcaaaatcaaagatgctgacctgccgagtccgcagcaaaaactcgatatcctgcaggaaaccatcgccttcctgacgcaatcgggctatcagtttatcggtatggatcactttgcccgtccggatgacgagctggcggtggcccagcgtgaaggcgtgctgcatcgtaacttccagggctacaccactcagggcgataccgatctgctggggatgggcgtttccgccatcagcatgattggcgactgctacgcgcagaaccagaaagagttgaagcagtactatcagcaagtggatgaacaaggcaatgcgctgtggcgtggtattgcgctaacgcgtgatgactgtattcgccgcgatgtgattaagtcgctcatctgcaacttccgtctggattacgcccctattgagaaacagtgggatttgcacttcgctgattactttgcggaagatctcaagctgctcgccccgttagcaaaagatgggctggtggatgtggatgagaagggaatacaggtgacggcgaaaggtcgcttgctgatccgcaacatttgcatgtgctttgatacctatctgcgccagaaagcgcggatgcagcagttctctcgggtgatttaa

SEQ ID NO: 96 - protein, 457 aa, Escherichia coli
MSVQQIDWDLALIQKYNYSGPRYTSYPTALEFSEDFGEQAFLQAVARYPERPLSLYVHIPFCHKLCYFCGCNKIVTRQQHKADQYLDALEQEIVHRAPLFAGRHVSQLHWGGGTPTYLNKAQISRLMKLLRENFQFNADAEISIEVDPREIELDVLDHLRAEGFNRLSMGVQDFNKEVQRLVNREQDEEFIFALLNHAREIGFTSTNIDLIYGLPKQTPESFAFTLKRVAELNPDRLSVFNYAHLPTIFAAQRKIKDADLPSPQQKLDILQETIAFLTQSGYQFIGMDHFARPDDELAVAQREGVLHRNFQGYTTQGDTDLLGMGVSAISMIGDCYAQNQKELKQYYQQVDEQGNALWRGIALTRDDCIRRDVIKSLICNFRLDYAPIEKQWDLHFADYFAEDLKLLAPLAKDGLVDVDEKGIQVTAKGRLLIRNICMCFDTYLRQKARMQQFSRVI

SEQ ID NO: 97 - protein, 466 aa, Synechocystis
  PEPTIDE (1)..(466): HemN protein from Synechocystis sp. protein ID BAA18218.1; gene ID: 14617080
MTTTFPTVEFSAELLNKYNQGIPRYTSYPPATELNKEFDPSDFQTAINLGNYKKTPLSLYCHIPFCAKACYFCGCNTIITQHKPAVDPYLKAVAKQIALVAPLVDQQRPVQQLHWGGGTPNYLTLEQAEFLFNTITDAFPLAENAEISIEINPCYVDKDYIFALRQLGFNRISFGIQDFNSQVQQAVNRIQPEAMLFQVMDWIRQANFDSVNVDLIYGLPHQNLATFRETLRKTAQLNPDRIAVFNFAYVPWLKPVQKKMPESALPPAEEKLKIMQATIADLTEQGYVFIGMDHFAKPDDELAIAQRRGELHRNFQGYTTQPESDLLGFGITSISMLQDVYAQNHKTLKAFYNALDREVMPIEKGFKLSQDDLIRRTVIKELMCQFKLSAQELESKYNLGFDCDFNDYFAKELSALDVLEADGLLRRLGDGLEVTPRGRILIRNIAAVFDTYLQNKSKQQMFSRAI

SEQ ID NO: 98 - protein, 368 aa, Thermus Aquaticus
  PEPTIDE (1)..(368): HemN protein from Thermus Aquaticus proteinID: AAS80471.1; GeneID:2776474
MPNPASLYVHVPFCPTLCPYCDFHVVRRGGVWVEAYLKRLQEEAKALHQAHPGPLATLYLGGGTPSYLRDRELVALFQSLPWRLQEGAEVTLEANPGTLSPSRLALLKDLGVNRLSLGVQSFQDEVLRFLGRAHGRKGALKAVEMALEAGFRVSIDLILGLPMQDVEKDLKEAARLGVGHVSAYTLQVEKGTPFALLGLQEDREREAWAMERAEEVLGEAGLLRYEVSNFAREGEEARHNLVYWRAGFWLALGPAATGQYPGEGPAYAFRRTGPPLPRWLTGEAPREEAITPLEHAKEALMLGLRLKEGVDVGELEGRTGLSLWPALEARAEALAQEGLLLLSGKRLRPTGKGLALLNAVVLSLWEAL

SEQ ID NO: 99 - protein, 456 aa, Candidatus Heimdallarchaeota
  PEPTIDE (1)..(456): HemN protein proteinID: ABF87266.1; GeneID:4101904
MDATKLSYELINRFDKRVPRYTSYPTVPNWTEKFGPKDYISDLVTRSEFEDPLSIYVHIPFCIRRCLFCACTVLVTQRVDRPEKYLEYLKLEIDKTRDLLNSRDDVIQLHFGGGTPTHLTPEQLDDLLGHIYDRFSMNGNAEKSIELHPSVTSIEHMEVLKTYGFNRVSMGVQDFDLNVQEKLNRFQTYEETKLILDFARSNNFDGVNMDLIYGLPYQTTEGFEDTIDKTLILKPDRIALYSYAHLPNIIRHQSTIPLDVIPTGPNKLDLFLYAREKFLEDGYVPIGFDHFALPDDEISISVHEKTLRRNFMGFTTKAGTDMIAFGYSGISELHTAYAQNSKDMGEYETMIEKYGVATIKGYKLSDEDILRKQVIMDWLCLNEIDYTVLKEKYGSNSKKLIKISEDLFPNFQEIDFVEKTDNGWKATSMGRLFARVIASSFDEYYDASKHLFSRSV

SEQ ID NO: 100 - protein, 458 aa, Cryomorphaceae bacterium
  PEPTIDE (1)..(458): HemN protein proteinID: ADQ80711.1; GeneID:10000249
MLSKKELLIKYNESGPRYTSYPPATFFDSKFSNSDHERHVIESNNENPSNISIYIHIPFCPQICHFCGCTTESGYTKPFLERYVDAVIKEINHVAKKIDKKRKVTQVHWGGGTPNAISYRYIEKITNKLYDEFKFASSYEMAIECNPAHLEFRHIELLKKFGFNRISLGIQDFRDDVLEAINRKPSKHKIEDIVSKIKSEGFTGTNIDLVYGLPLQTVSSFKKTVERAIELQTERLVTFSYAHVPSVLPRQKILEKIGFPNSNDKASMYENSYKKFVSSGYISIGMDHYSLPEDEFAIALKNKNLHRNFQGYCTRETTGQVYAFGASAISQLSSAYSQNIKNAAQYIKAIETNNLAIFRGYSVTKEQKVIRDVINNLMCNYYVDFNDIAVNNEISINKLYDIIDFSYENFDEFVNDGILEISNNKINVYENGRLFTRNIAMKFDPLVKKNIGTYSKTI

SEQ ID NO: 101 - protein, 374 aa, Thermotoga neapolitana
  PEPTIDE (1)..(374): HemN protein proteinID: ACM23585.1; GeneID:7377789
MKLAVYVHIPFCKKKCVYCDFYSVASEDFEEYLSLVFEEIELYRDVLKESEIETVYFGGGTPSLVPPSFLEKILEKLKEVSKKFSPLETTIEVNPESVDREKLRSYRKMGINRISLGVQSCDDGVLKKCGRLYDEKMLKEKAELVLAEFDNVNFDFILGLPGETDETLEKNLHFLEEFTPQHVSLYFLEVDENTPLYSLLKKNLLTLPDSDEVERRHDVFVEFLKSRGFERYEISNFARPERESRHNLFYWRNHDYLGFGPSAGGHLGRFRYTNVSDLSMYAKMVKEKTFPYDYQHKNTEEEEALEILFMGLRTKEGVELKRVERLMFLVEKLQKEYACYVKVKDGKIFLSEEGMDLSKKIFEDLIEWYREAEK

SEQ ID NO: 102 - protein, 458 aa, Rhodothermus marinus
  PEPTIDE (1)..(458): HemN protein proteinID: ACY48251.1; GeneID:8568012
MLVSPALVEKYNRPGPRYTSYPPAPHFRPGMAPETVAAMIRADNERPDPEPLSLYVHLPFCRTLCYYCGCHMIVTHRPEKIARYLDYLEREIALVSRWVAPDRPVVQLHWGGGTPTYLAPEQILALMDLLRRHFRFAPDAEIGIEADPRGLTRAHLEAARTAGFNRISFGVQDLDPTVQQAINRVQPYEQVARITRWARELGFESISYDLIYGLPHQHLTQFERTIRQVIDLGPDRISLFSYAHVPWKKKHQRLIREEWLPRPAEKLQLFLRAVELLTTEGGYRYIGMDHFARPEDPLSRALDEGTLQRNFQGYSTHGGTELYAFGISAISQLRDAYVQNVLTLPEYYAALDRGHLPVGKGYVLTDEDRLRRHVIMALMCHFRLDVPEVERRFGIDFHAHFADALAQLEEMEADGLVVRRPDVIEVTESGRFFIRNVAMAFDAYLQATTDRPMYSQTV

SEQ ID NO: 103 - protein, 456 aa, Aquifex aeolicus
  PEPTIDE (1)..(456): HemN protein proteinID: NP_214455.1; GeneID:1193875
MKAEFDKELIKKYDRPGPRYTSYPPATEFTEEVKEDEYVKRLIKSNERKTPLSLYFHIPFCEQRCLYCGCNVIISHRKGIEEPYLERVCREMDLVSQYLDKDRKVIQLHWGGGTPNYLSPEQIKWFMEEIRKRFEFGDNAEISIELDPRYLTDEQIKAIKDAGFNRISLGVQDLDPKVQQAVNRVQPYELIKEKMEKLREAGFESINLDLIYGLPYQTKESFEKTVEKVIELNPDRIATYSFAYIPQVKPHQQLLPKEALPSAEEKLRIFEMVINKFQEAGYVYIGMDHFAKPEDELAVAQRKGELWRNFQGYTTKKGVELLGFGATSIGMLYDSYFQNWKTLRDYNKTVDEGKIPVFRGYVLNEDDFIRREVIMDIMCNLGVEFSKIENMFGINFREYFAKELEELKEMEEDGLIKVEEDRIKIMPVGRLLIRNVAMVFDAHLRRKKELNFSRTI

SEQ ID NO: 104 - protein, 494 aa, Cupriavidus necator
  PEPTIDE (1)..(494): HemN protein proteinID: WP_041687570; GeneID:4247051
MIPSAITSPAPDRRALSDFRALAGRIDGNGPRYTSYPTADRFHNGPDLSLYHDALAACRADAPAPLSLYLHIPFCENICYYCGCNKIITRDHGRSARYVNYLGREMALVADRLGPRRQVLQSHWGGGTPTFLDPGEMRRVMALLHEHFELAAEGEHSIEIDPRRVDHARMALLAELGFNRVSLGVQDFDPEVQQAIHRIQPFEETRAVVDAARTLGFRSVSLDLIYGLPHQTAARFGRTIDQVLALRPDRLSVYSYAHLPHVFKPQRRIDENALPPAGEKLDILVSTIERLSAEGYVYIGMDHFALPDDDLAVAQREGRLQRNFQGYSTHAGYDQVGLGISAIGAIAGRYVQNARTLDEYYGALDHGRLPLARGVAMSADDHLRREIIGALMCNGVLDIPALEARHGIRFGTAFAPELADLAALGADGLVQCAPDRITVTPLGRLLVRRVAMVFDRYLREDAARPASTGAQAVAANDGAQPVRFVPRARYSRVV

SEQ ID NO: 105 - protein, 379 aa, Lactococcus lactis?
  PEPTIDE (1)..(379): HemN protein proteinID: NP_267295.1; GeneID:1114779
MLQKPNSAYFHIPFCSHICYYCDFAKVLMTGQPIDAYIESLIEEFQSFEIEKLRTIYIGGGTPSVLSAQQLERLLTAIAEQLDLEVLEEFTVEANPGDLSDEVIKVLADSAVNRISLGVQTFNNALLKKIGRTHTEVQVYDSVERLKKAGFENITIDLIYALPGQTMEMVKSDVEKFLELKLPHVALYSLILEDHTVFMNRQRRGLLRLPSEDKNADMYEYIMDILAKNGYNHYEVSNFGLPGFESKHNITYWDNEEYYGIGAGASGYLAGIRYKNLGPVHHYLKAAPTEKRINEEVLSKKSQIEEEMFLGLRKKSGVLVEKFENKFKCSFEKLYGEQITELINQKLLYNDRQRIHMTDKGFELGNNVFEKFLLDDINF

SEQ ID NO: 106 - protein, 379 aa, Bacillus subtilis
  PEPTIDE (1)..(379): HemN protein proteinID:NP_390428.2; GeneID:937845
MKSAYIHIPFCEHICHYCDFNKYFIQSQPVDEYLNALEQEMINTIAKTGQPDLKTIFIGGGTPTSLSEEQLKKLMDMINRVLKPSSDLSEFAVEANPDDLSAEKLKILKEAGVNRLSFGVQTFEDDLLEKIGRVHKQKDVFTSFERAREIGFENISLDLMFGLPGQTLKHLEHSINTALSLDAEHYSVYSLIVEPKTVFYNLMQKGRLHLPPQEQEAEMYEIVMSKMEAHGIHQYEISNFAKAGMESKHNLTYWSNEQYFGFGAGAHGYIGGTRTVNVGPVKHYIDLIAEKGFPYRDTHEVTTEEQIEEEMFLGLRKTAGVSKKRFAEKYGRSLDGLFPSVLKDLAEKGLIHNSESAVYLTHQGKLLGNEVFGAFLGEL

SEQ ID NO: 107 - protein, 418 aa, Escherichia coli
  PEPTIDE (1)..(418): HemA protein proteinID:NP_415728.1; GeneID:945017
MTLLALGINHKTAPVSLRERVSFSPDKLDQALDSLLAQPMVQGGVVLSTCNRTELYLSVEEQDNLQEALIRWLCDYHNLNEEDLRKSLYWHQDNDAVSHLMRVASGLDSLVLGEPQILGQVKKAFADSQKGHMKASELERMFQKSFSVAKRVRTETDIGASAVSVAFAACTLARQIFESLSTVTVLLVGAGETIELVARHLREHKVQKMIIANRTRERAQILADEVGAEVIALSDIDERLREADIIISSTASPLPIIGKGMVERALKSRRNQPMLLVDIAVPRDVEPEVGKLANAYLYSVDDLQSIISHNLAQRKAAAVEAETIVAQETSEFMAWLRAQSASETIREYRSQAEQVRDELTAKALAALEQGGDAQAIMQDLAWKLTNRLIHAPTKSLQQAARDGDNERLNILRDSLGLE

SEQ ID NO: 108 - protein, 426 aa, Escherichia coli
  PEPTIDE (1)..(426): HemL protein proteinID:NP_414696.1; GeneID:946892
MSKSENLYSAARELIPGGVNSPVRAFTGVGGTPLFIEKADGAYLYDVDGKAYIDYVGSWGPMVLGHNHPAIRNAVIEAAERGLSFGAPTEMEVKMAQLVTELVPTMDMVRMVNSGTEATMSAIRLARGFTGRDKIIKFEGCYHGHADCLLVKAGSGALTLGQPNSPGVPADFAKYTLTCTYNDLASVRAAFEQYPQEIACIIVEPVAGNMNCVPPLPEFLPGLRALCDEFGALLIIDEVMTGFRVALAGAQDYYGVVPDLTCLGKIIGGGMPVGAFGGRRDVMDALAPTGPVYQAGTLSGNPIAMAAGFACLNEVAQPGVHETLDELTTRLAEGLLEAAEEAGIPLVVNHVGGMFGIFFTDAESVTCYQDVMACDVERFKRFFHMMLDEGVYLAPSAFEAGFMSVAHSMEDINNTIDAARRVFAKL

SEQ ID NO: 109 - protein, 324 aa, Escherichia coli
  PEPTIDE (1)..(324): HemB protein proteinID:NP_414903.4; GeneID:945017
MTDLIQRPRRLRKSPALRAMFEETTLSLNDLVLPIFVEEEIDDYKAVEAMPGVMRIPEKHLAREIERIANAGIRSVMTFGISHHTDETGSDAWREDGLVARMSRICKQTVPEMIVMSDTCFCEYTSHGHCGVLCEHGVDNDATLENLGKQAVVAAAAGADFIAPSAAMDGQVQAIRQALDAAGFKDTAIMSYSTKFASSFYGPFREAAGSALKGDRKSYQMNPMNRREAIRESLLDEAQGADCLMVKPAGAYLDIVRELRERTELPIGAYQVSGEYAMIKFAALAGAIDEEKVVLESLGSIKRAGADLIFSYFALDLAEKKILR

SEQ ID NO: 110 - protein, 313 aa, Escherichia coli
  PEPTIDE (1)..(313): HemC protein proteinID:YP_026260.1; GeneID:947759
MLDNVLRIATRQSPLALWQAHYVKDKLMASHPGLVVELVPMVTRGDVILDTPLAKVGGKGLFVKELEVALLENRADIAVHSMKDVPVEFPQGLGLVTICEREDPRDAFVSNNYDSLDALPAGSIVGTSSLRRQCQLAERRPDLIIRSLRGNVGTRLSKLDNGEYDAIILAVAGLKRLGLESRIRAALPPEISLPAVGQGAVGIECRLDDSRTRELLAALNHHETALRVTAERAMNTRLEGGCQVPIGSYAELIDGEIWLRALVGAPDGSQIIRGERRGAPQDAEQMGISLAEELLNNGAREILAEVYNGDAPA

SEQ ID NO: 111 - protein, 246 aa, Escherichia coli
  PEPTIDE (1)..(246): HemD protein proteinID: NP_418248.1; GeneID:948587
MSILVTRPSPAGEELVSRLRTLGQVAWHFPLIEFSPGQQLPQLADQLAALGESDLLFALSQHAVAFAQSQLHQQDRKWPRLPDYFAIGRTTALALHTVSGQKILYPQDREISEVLLQLPELQNIAGKRALILRGNGGRELIGDTLTARGAEVTFCECYQRCAIHYDGAEEAMRWQAREVTMVVVTSGEMLQQLWSLIPQWYREHWLLHCRLLVVSERLAKLARELGWQDIKVADNADNDALLRALQ

SEQ ID NO: 112 - protein, 354 aa, Escherichia coli
  PEPTIDE (1)..(354): HemE protein proteinID:NP_418425.1; GeneID:948497
MTELKNDRYLRALLRQPVDVTPVWMMRQAGRYLPEYKATRAQAGDFMSLCKNAELACEVTLQPLRRYPLDAAILFSDILTVPDAMGLGLYFEAGEGPRFTSPVTCKADVDKLPIPDPEDELGYVMNAVRTIRRELKGEVPLIGFSGSPWTLATYMVEGGSSKAFTVIKKMMYADPQALHALLDKLAKSVTLYLNAQIKAGAQAVMIFDTWGGVLTGRDYQQFSLYYMHKIVDGLLRENDGRRVPVTLFTKGGGQWLEAMAETGCDALGLDWTTDIADARRRVGNKVALQGNMDPSMLYAPPARIEEEVATILAGFGHGEGHVFNLGHGIHQDVPPEHAGVFVEAVHRLSEQYHR

SEQ ID NO: 113 - protein, 181 aa, Escherichia coli
  PEPTIDE (1)..(181): HemG protein proteinID:NP_418292.1 ; GeneID:948331
MKTLILFSTRDGQTREIASYLASELKELGIQADVANVHRIEEPQWENYDRVVIGASIRYGHYHSAFQEFVKKHATRLNSMPSAFYSVNLVARKPEKRTPQTNSYARKFLMNSQWRPDRCAVIAGALRYPRYRWYDRFMIKLIMKMSGGETDTRKEVVYTDWEQVANFAREIAHLTDKPTLK

SEQ ID NO: 114 - protein, 320 aa, Escherichia coli
  PEPTIDE (1)..(320): HemH protein proteinID:NP_415008.1  ; GeneID:947532
MRQTKTGILLANLGTPDAPTPEAVKRYLKQFLSDRRVVDTSRLLWWPLLRGVILPLRSPRVAKLYASVWMEGGSPLMVYSRQQQQALAQRLPEMPVALGMSYGSPSLESAVDELLAEHVDHIVVLPLYPQFSCSTVGAVWDELARILARKRSIPGISFIRDYADNHDYINALANSVRASFAKHGEPDLLLLSYHGIPQRYADEGDDYPQRCRTTTRELASALGMAPEKVMMTFQSRFGREPWLMPYTDETLKMLGEKGVGHIQVMCPGFAADCLETLEEIAEQNREVFLGAGGKKYEYIPALNATPEHIEMMANLVAAYR

SEQ ID NO: 115 - protein, 1049 aa, Bacillus megaterium [sequence omitted]

SEQ ID NO: 116 - DNA, 1044 bp, Escherichia coli
  CDS (1)..(1044): NadA gene encoding quinolate synthase
atgagcgtaatgtttgatccagacacggcgatttatcctttccccccgaagccgacgccgttaagcattgatgaaaaagcgtattaccgcgagaagataaaacgtctgctaaaagaacgtaatgcggtgatggttgcccactactataccgatcccgaaattcaacaactggcagaagaaaccggtggctgtatttctgattctctggaaatggcgcgcttcggtgcaaagcatcccgcttctactttgttagtcgctggggtgagatttatgggagaaaccgccaaaattctcagtccggaaaaaacaattctgatgccgacacttcaggctgaatgttcactggatctcggctgccctgttgaagaatttaacgcattttgcgatgcccatcccgatcgtactgtcgtcgtctacgccaacacttctgctgcggtaaaagcgcgcgcagattgggtggtaacttcaagcattgccgtcgaacttattgatcatcttgatagtttgggtgaaaaaatcatctgggcacccgacaaacatctggggcgttacgtgcaaaaacagacgggtggagacattctatgctggcagggtgcctgtattgtgcatgatgaatttaagactcaggcgttaacccgcttgcaagaagaatacccggatgctgccatactggtgcatccagaatcaccacaagctattgtcgatatggcggatgcggtcggttccaccagtcaactgatcgctgctgcgaaaacattgccacatcagaggcttattgtggcaaccgatcggggtattttctacaaaatgcagcaggcggtgccagataaagagttactggaagcaccaaccgcaggtgagggtgcaacctgccgcagctgcgcgcattgtccgtggatggccatgaatggccttcaggccatcgcagaggcattagaacaggaaggaagcaatcacgaggttcatgttgatgaaaggctgcgagagagggcgctggtgccgctcaatcgtatgctggattttgcggctacactacgtggataa

SEQ ID NO: 117 - protein, 347 aa, Escherichia coli
MSVMFDPDTAIYPFPPKPTPLSIDEKAYYREKIKRLLKERNAVMVAHYYTDPEIQQLAEETGGCISDSLEMARFGAKHPASTLLVAGVRFMGETAKILSPEKTILMPTLQAECSLDLGCPVEEFNAFCDAHPDRTVVVYANTSAAVKARADWVVTSSIAVELIDHLDSLGEKIIWAPDKHLGRYVQKQTGGDILCWQGACIVHDEFKTQALTRLQEEYPDAAILVHPESPQAIVDMADAVGSTSQLIAAAKTLPHQRLIVATDRGIFYKMQQAVPDKELLEAPTAGEGATCRSCAHCPWMAMNGLQAIAEALEQEGSNHEVHVDERLRERALVPLNRMLDFAATLRG

SEQ ID NO: 118 - protein, 554 aa, Thermotoga maritima
  PEPTIDE (1)..(554): NadA proteinID:NP_228361.1 ; GeneID:897608
MRSDVIKKGLERVPHRSLLKALGITDDEMRRPFIGIVSSWNEIIPGHVHLDKVVEAVKAGVRMAGGVPFVFPTIGICDGIAMDHRGMKFSLPSRELIADSIEIVASGFPFDGLVFVPNCDKITPGMMMAMGRLNIPSVLISGGPMLAGRYNGRDIDLITVFEAVGGYKVGKVDEETLKAIEDLACPGAGSCAGLFTANTMNSLAEALGIAPRGNGTVPAVHAKRLRMAKEAGMLVVELVKRDVKPRDIVTLDSFMNAVMVDLATGGSTNTVLHLKAIAESFGIDFDIKLFDELSRKIPHICNISPVGPYHIQDLDDAGGIYAVMKRLQENGLLKEDVMTIYLRKIGDLVREAKILNEDVIRPFDNPYHKEGGLGILFGNLAPEGAVAKLSGVPEKMMHHVGPAVVFEDGEEATKAILSGKIKKGDVVVIRYEGPKGGPGMREMLSPTSAIVGMGLAEDVALITDGRFSGGSHGAVIGHVSPEAAEGGPIGIVKDGDLIEIDFEKRTLNLLISDEEFERRMKEFTPLVKEVDSDYLRRYAFFVQSASKGAIFRKP

SEQ ID NO: 119 - protein, 373 aa, Acidobacterium capsulatum
  PEPTIDE (1)..(373): NadA proteinID: C1F557.1 ; GeneID: 7701111
MEVASAVAEPDACSLDHYLSLPDHSMDERIAAARARLGASTVLLGHHYQRDEVVRFADFTGDSYKLSKIAAETEAKYVVFCGVHFMAESADVLGRSEQHVILPDLNAGCSMADMAEISQVEACWETLLGAGLGAEQVMPLTYMNSTAAIKAFCGERGGLVCTSSNARKAFEWAFARAEKILFLPDQHLGRNTAFAMGIGLDEMVVFDPWQIGGGVPAEKLRAAKVILWKGHCSVHQRFLPEHVDRVRAKYEGIRVVVHPECRWEVCQKADALGSTERIIAEVEEAPEGTMFAIGTEIHLVNRLAKRFAPLGKKIITLDDTGCLCTTMYRISPQHLAWALENLLEGRVVNQIKVTDEVKHWARVALDRMLEIRG

SEQ ID NO: 120 - protein, 322 aa, Aquifex aeolicus
  PEPTIDE (1)..(322): NadA proteinID: NP_214298.1 ; GeneID: 1193537
MVQLALKEEKELTKEEIKELQKEVRRLAKEKNAVILAHYYQRPEVQDIADFVGDSLELARKASQTDADIIVFCGVRFMCETAKIVNPEKKVLHPNPESGCPMADMITAKQVRELREKHPDAEFVAYINTTADVKAEVDICVTSANAPKIIKKLEAKKIVFLPDQALGNWVAKQVPEKEFIIWKGFCPPHFEFTYKELEKLKEMYPDAKVAVHPECHPRVIELADFVGSTSQILKYATSVDAKRVIVVTEVGLKYTLEKINPNKEYIFPQSMNYCGTVYCCTMKGITLPKVYETLKNEINEVTLPKDIIERARRPIERMLELS

SEQ ID NO: 121 - protein, 368 aa, Bacillus subtilis
  PEPTIDE (1)..(368): NadA proteinID: NP_390663.1 ; GeneID: 937522
MSILDVIKQSNDMMPESYKELSRKDMETRVAAIKKKFGSRLFIPGHHYQKDEVIQFADQTGDSLQLAQVAEKNKEADYIVFCGVHFMAETADMLTSEQQTVVLPDMRAGCSMADMADMQQTNRAWKKLQHIFGDTIIPLTYVNSTAEIKAFVGKHGGATVTSSNAKKVLEWAFTQKKRILFLPDQHLGRNTAYDLGIALEDMAVWDPMKDELVAESGHTNVKVILWKGHCSVHEKFTTKNIHDMRERDPDIQIIVHPECSHEVVTLSDDNGSTKYIIDTINQAPAGSKWAIGTEMNLVQRIIHEHPDKQIESLNPDMCPCLTMNRIDLPHLLWSLEQIEKGEPSGVIKVPKAIQEDALLALNRMLSIT

SEQ ID NO: 122 - protein, 394 aa, Corynebacterium glutamicum
  PEPTIDE (1)..(394): NadA proteinID: Q8NRI0 ; GeneID: 1019053
MPDVYGPGASQNDPIPAHAPRQQVLPEEYQRASDDELHRRIREAKDTLGDKVVILGHFYQRDEVIQHADFVGDSFQLARAAKTRPEAEAIVFCGVHFMAETADLLSTDEQSVILPNLAAGCSMADMADLDSVEDCWEQLTSIYGDDTLIPVTYMNSSAALKGFVGEHGGIVCTSSNARSVLEWAFERGQRVLFFPDQHLGRNTAKAMGIGIDQMPLWNPNKPLGGNTVSELENAKVLLWHGFCSVHKRFTVEQINKARAEYPDVHVIVHPESPMPVVDAADSSGSTDFIVKAIQAAPAGSTFAIGTEINLVQRLAAQYPQHTIFCLDPVICPCSTMYRIHPGYLAWALEELVAGNVINQISVSESVAAPARVALERMLSVVPAAPVTPSSSKDA

SEQ ID NO: 123 - protein, 352 aa, Pseudomonas putida
  PEPTIDE (1)..(352): NadA proteinID: B0KTH8.1 ; GeneID: 5871987
MTQISERLLVQAHLDAKQPNPLTAEQEAEYRAAIAAELKAQNAVLVAHYYCDPVIQALAEETGGCVSDSLEMARFGKNHPAETVIVAGVRFMGETAKILTPEKRVLMPTLEATCSLDLGCPVEEFSAFCDQHPERTVVVYANTSAAVKARADWVVTSSCALEIVESLMDNGETIIWGPDQHLGRYIQKQTGADMLLWDGACIVHEEFKSRQLADMKALYPDAAILVHPESPEAVIELADAVGSTSQLIKAAQTLPNKTFIVATDRGIFYKMQQLCPDKEFVEAPTAGNGAACRSCAHCPWMAMNTLERVLDCLRKGGDEIFVDPALVPKAIKPLNRMLDFTQAARLKLSGNA

SEQ ID NO: 124 - protein, 311 aa, Sulfolobus solfataricus
  PEPTIDE (1)..(311): NadA proteinID: WP_009989240 ; GeneID: 1455236
MTRVEELLSQIKNLKTEKNAIILGHNYMEYSVQLVSDFTGDSYDLAVKAMKTNAKIILFAGVYFMAEQASALNPNKKVLSPDPNAGCTLSDSLDVKTLQEYKEKYPNAPVVLYINTSIYAKALADYIVTSSTAVKVVQKLNADTILFGPDANLANYVQQKVPNKKIIKVPPNGRCIVHANYTKQLVELARKKYPNALLMAHPEAPLEILESADFVGSTNQMIQFSKENKNEEFIVATEIGMINALKIKNPSKKFYPLVTTEACACARCPYMNMINLEKVKRSLEEEVYEVKVPEDIAERVKRAFENTMKLL

SEQ ID NO: 125 - protein, 320 aa, Synechococcus elongatus
  PEPTIDE (1)..(320): NadA proteinID: Q9L790.1 ; GeneID: 3773620
MFLAADRPTTDLPADLPAAIAALKQELNAVILAHYYQEAAIQDVADYIGDSLGLSRQAAAADADVIVFAGVHFMAETAKILNPQRQVLLPDLAAGCSLADSCPPEAFAAFKAAHPNHIVISYINCTAEIKALSDIICTSSNAVKIVQQIPVDQPIIFAPDRNLGRYVMQQTGRDLVLWDGSCIVHETFSEQRLLELQARHPDAEIIAHPECETPVLDQARFIGSTTALLNYSLNSPSREFIVVTEPGIIHQMQQAAPEKTFIPAPPQDTTCACNECPFMRLNTLEKLYLCMRDRRPEIQIPEETRLAALRPIERMLAMSA

SEQ ID NO: 126 - protein, 310 aa, Thermus thermophilus
  PEPTIDE (1)..(310): NadA proteinID: YP_144250.1 ; GeneID: 3168272
MGRMRGEALAQEVLRLKRERNAVILAHSYQLPEVQEVADFVGDSLGLAREAQRTRAEVIVFCGVHFMAETAAILNPEKTVLLPDLEAGCSLADSIRPEDVLAWKAKHPDGIVVAYVNTKAEVKALADVCVTSANAVEVVSRLPQDRPIYFVPDMFLGAHVARVTGRRLDLFPGECHVHAGIREEHLKALLEAHPGAEFLIHPECGCGSGCLYLKPDAKMLSTEGMVRYAKGAEAREFVVATEVGILHRLKKEAPEKAFFPVKPDAVCEYMKRITLEKVYLSLKEMRHVVRVPEEVAGRARRALEAMVAVG

SEQ ID NO: 127 - protein, 718 aa, Arabidopsis thaliana
  PEPTIDE (1)..(718): NadA proteinID: NP_199832 ; GeneID: 1193537
MALALSVAPTSSSLSSLLSRTPNPSPNFRTTHLNFGSQRRIYTINPLLRSFKCLQSSSRDVNASPFSISAIASSSSSSQTTELVPYKLQRLVKEFKSLTEPIDRLKWVLHYASLLPQMPESSKTESNRVMGCTARVWLDAELGQDGKMRFCADSDSDVSKGMCSCLIQVLDEASPVEVMELKTEDLAELNVGLLGGERSRVNTWYNVLVSMQKKTRRLVAEREGKVPSFEPFPSLVLTAHGIEAKGSFAQAQAKYLFPEESRVEELVNVLKEKKIGVVAHFYMDPEVQGVLTAAQKHWPHISISDSLVMADSAVTMAKAGCQFITVLGVDFMSENVRAILDQAGFEKVGVYRMSDETIGCSLADAASAPAYLNYLEAASRSPPSLHVVYINTSLETKAFAHELVPTITCTSSNVVQTILQAFAQMPELTVWYGPDSYMGANIVKLFQQMTLMTNEEIANIHPKHSLDSIKSLLPRLHYFQEGTCIVHHLFGHEVVERIKYMYCDAFLTAHLEVPGEMFSLAMEAKKREMGVVGSTQNILDFIKQKVQEAVDRNVDDHLQFVLGTESGMVTSIVAVIRSLLGSSANSKLKVEVVFPVSSDSMTKTSSDSSNSIKVGDVALPVVPGVAGGEGCSIHGGCASCPYMKMNSLSSLLKVCHKLPDLENVYGGFIAERFKRQTPQGKLIADVGCEPILHMRHFQANKELPDKLVHQVLSCESKR

SEQ ID NO: 128 - protein, 540 aa, Escherichia coli
  PEPTIDE (1)..(540): NadB proteinID: NP_417069.1 ; GeneID: 947049
MNTLPEHSCDVLIIGSGAAGLSLALRLADQHQVIVLSKGPVTEGSTFYAQGGIAAVFDETDSIDSHVEDTLIAGAGICDRHAVEFVASNARSCVQWLIDQGVLFDTHIQPNGEESYHLTREGGHSHRRILHAADATGREVETTLVSKALNHPNIRVLERSNAVDLIVSDKIGLPGTRRVVGAWVWNRNKETVETCHAKAVVLATGGASKVYQYTTNPDISSGDGIAMAWRAGCRVANLEFNQFHPTALYHPQARNFLLTEALRGEGAYLKRPDGTRFMPDFDERGELAPRDIVARAIDHEMKRLGADCMFLDISHKPADFIRQHFPMIYEKLLGLGIDLTQEPVPIVPAAHYTCGGVMVDDHGRTDVEGLYAIGEVSYTGLHGANRMASNSLLECLVYGWSAAEDITRRMPYAHDISTLPPWDESRVENPDERVVIQHNWHELRLFMWDYVGIVRTTKRLERALRRITMLQQEIDEYYAHFRVSNNLLELRNLVQVAELIVRCAMMRKESRGLHFTLDYPELLTHSGPSILSPGNHYINR

SEQ ID NO: 129 - protein, 250 aa, Mannheimia succiniciproducens
  PEPTIDE (1)..(250): NadE proteinID: WP_011201048.1 ; GeneID: 3075425
MKTAAYADYLIQWLENQRTELYGMDGYTLGVSGGIDSAVCAHLAARTGAPVQALILPAEVTSPSDVADAQATLESAGIDGQIISIAPWYDLIMQQLSPVLNSEPERVNVLKGNLMARLRMIALFTTAQSHRSIVLGTDNAAEWLTGYFTKFGDGAADVLPLAGLRKEQVFELGRYLGVPQSVLDKKPSAGLWAGQTDEAEMGVTYAEIDAYLRGETVSPQALQQIRFWHNRSHHKRMLPPKPKSPDEAEC

SEQ ID NO: 130 - protein, 237 aa, Escherichia coli
  PEPTIDE (1)..(237): AphA proteinID: NP_418479.1 ; GeneID: 948562
MRKITQAISAVCLLFALNSSAVALASSPSPLNPGTNVARLAEQAPIHWVSVAQIENSLAGRPPMAVGFDIDDTVLFSSPGFWRGKKTFSPESEDYLKNPVFWEKMNNGWDEFSIPKEVARQLIDMHVRRGDAIFFVTGRSPTKTETVSKTLADNFHIPATNMNPVIFAGDKPGQNTKSQWLQDKNIRIFYGDSDNDITAARDVGARGIRILRASNSTYKPLPQAGAFGEEVIVNSEY

SEQ ID NO: 131 - protein, 213 aa, Escherichia coli
  PEPTIDE (1)..(213): PncA proteinID: WP_001135066.1 ; GeneID: 946276
MPPRALLLVDLQNDFCAGGALAVPEGDSTVDVANRLIDWCQSRGEAVIASQDWHPANHGSFASQHGVEPYTPGQLDGLPQTFWPDHCVQNSEGAQLHPLLHQKAIAAVFHKGENPLVDSYSAFFDNGRRQKTSLDDWLRDHEIDELIVMGLATDYCVKFTVLDALQLGYKVNVITDGCRGVNIQPQDSAHAFMEMSAAGATLYTLADWEETQG

SEQ ID NO: 132 - protein, 241 aa, Streptomyces sampsonii
  PEPTIDE (1)..(241): Chi proteinID: WP_010640201 ; GeneID: 31254016
MRTRLIGLLTAAASALTLSVLALGPTAQADTRAAADDFIVSEGQFESMFPNRNSFYSYSGLTDALSAYPGFTGTGSDTTRKQEAAAFLANVSHETGGLVHIVEQNEANYPHYCDTTQPFGCPAGNDKYYGRGPVQLSWNYNYKAAGDALGIDLLNNPDLVQNDASVAWKTGLWFWNTQSGAGSMTPHDAIVNGAGFGETIRAINGSIECNGGNPGQVQSRIDLYERFTDVLGVEPGDNLSC

SEQ ID NO: 133 - protein, 297 aa, Escherichia coli
  PEPTIDE (1)..(297): NadC proteinID: NP_414651.1 ; GeneID: 948869
MPPRRYNPDTRRDELLERINLDIPGAVAQALREDLGGTVDANNDITAKLLPENSRSHATVITRENGVFCGKRWVEEVFIQLAGDDVTIIWHVDDGDVINANQSLFELEGPSRVLLTGERTALNFVQTLSGVASKVRHYVELLEGTNTQLLDTRKTLPGLRSALKYAVLCGGGANHRLGLSDAFLIKENHIIASGSVRQAVEKASWLHPDAPVEVEVENLEELDEALKAGADIIMLDNFETEQMREAVKRTNGKALLEVSGNVTDKTLREFAETGVDFISVGALTKHVQALDLSMRFR

SEQ ID NO: 134 - DNA, 1347 bp, Pseudomonas denitrificans
  CDS (1)..(1347): CobG gene encoding precorrin-3B synthase
atgcaagactcctcggctttaccagtacgtccacacgcgtgtcctgggcttttacgtatcgttgcgtcgcgtgacggaggaatttgtcgtatcaagttaccgtgcggtcagcttgatgcccaagccgcgcgtgcaattgctttggcagcagaacgtcatgctgacggtgttctggaggcaacgaatcgtgctaatctgcagattcgcggggtccatgcgggtgcggagaacgcccttagtcgtgaccttctggctgctggcttaggtccccgtgaacttgcagcggacgacgtgcgcaatctgttggttagtccggctcttgggcttgacgccggcacggcctttgatgctcaaccgctggctcgtcaattactggatttattagaacgcacgccccgctttcacgggttgtcgcccaagttcggcgtccaattggacgctggagagtctcttgcaatgcttgagcatcccaatgacatctggttgagtgcaatgtcggaggatgcagcgccacttttcgcctttgggctggcggggtgcccaccccaacgtaaaactgatcgcccagcccttgctgcagtttcggcggagcaattacctctgttggtagagaccctgttgcacttgttccttgaccttgccggggacgggcaaacgcgtatgcgccatctgcgcgagaaattgcgtgatgaagcccttttggaacgtctgcagcaacgcctgcctttccttttgcgtcttggccctttggttgacaactggcgtcgtcctgcacctcaggctttcgggtacttgggaattcgccctcagcgtcaacccgaacgtacccttgttggagcgggctttgttttaggacgccttgatagtagtatcttattcggattagcggaccttacggaacgtttttctggtgggcagcttcgccttacaccatggcaaagcctgatcttgcctgacgtggctcccgcagacgcccctgtggcgctgggtgcacttgcgaatttaggattacttatcgatgccgcacagccacttagtcgcttgatcgcatgttcgggcgcgtcggggtgtgctcgtggattagctgacactaaagctgacgccttgcgcctggcagagcgtcttcgccacgcgccccccgctggagtccacctttgcgggtgtcctcgttcctgtgcggctgctcacgtagcatcgtacactctgcttgcggttgctgatgatcgctatgatttgttccgtcgtgctgatggtgtcgcgggctttggccagcctttggcccgtaatttatcgcttaaggctgccggagacttactggctgctcctggtgcgcctacggacgcgtga

SEQ ID NO: 135 - protein, 448 aa, Pseudomonas denitrificans
MQDSSALPVRPHACPGLLRIVASRDGGICRIKLPCGQLDAQAARAIALAAERHADGVLEATNRANLQIRGVHAGAENALSRDLLAAGLGPRELAADDVRNLLVSPALGLDAGTAFDAQPLARQLLDLLERTPRFHGLSPKFGVQLDAGESLAMLEHPNDIWLSAMSEDAAPLFAFGLAGCPPQRKTDRPALAAVSAEQLPLLVETLLHLFLDLAGDGQTRMRHLREKLRDEALLERLQQRLPFLLRLGPLVDNWRRPAPQAFGYLGIRPQRQPERTLVGAGFVLGRLDSSILFGLADLTERFSGGQLRLTPWQSLILPDVAPADAPVALGALANLGLLIDAAQPLSRLIACSGASGCARGLADTKADALRLAERLRHAPPAGVHLCGCPRSCAAAHVASYTLLAVADDRYDLFRRADGVAGFGQPLARNLSLKAAGDLLAAPGAPTDA

SEQ ID NO: 136 - protein, 258 aa, Cornybacterium glutamicum
  PEPTIDE (1)..(258): CobG proteinID: AGN19217.1 ; GeneID: 16140455
MSSDVVFQSVSVDSGVSVGTVSFPAGRVGASEWEMLADVAESQGDGVIYVTSLAQCQVRGGSYSHAEPCATVVATPGHFVALAREIAGAVRRELTVGLDAGDGAILRQSVDVGFLLVDASFHIHINGVSTGQSVAPDDVVEVVRGLADASELSVESVAELCTPVAPVSLPEAQGNPAPIGWLEHDGVVSLGAGIPGGRVEARLARFIAVIEAETTITPWNSLIIHDLHEGVAEQVVKVLAPMGLVFDANSPLLESPAL

SEQ ID NO: 137 - protein, 468 aa, Frankia Canadensis
  PEPTIDE (1)..(468): CobG proteinID: WP_011435958 ; GeneID: 32156475
MPGWRTYAPPVPTSPRERVADACPGVLRTHAAADGALARLRLPGGLLDATAARALAACAREFGDGYLELTSRGNVQLRGLADGAATILAARARAAGLLPSDTHERVRNIVASPLSGRAVASWRDVTPLVEALDRALCADPALAALPGRILFALDDGSGDVAALPADLTLIALPAGRMLLRVAGEPRAVLLPERCAIPAILAAAHAFLDLLAATAPGDTPAWRIAELPTGHDRLLTAAQLAARRARTDDREPPAATIEIIQAGTAARSRGDASAVTPGPHRHSDGRYALTVLVPLGRLRADQLDLLAEIADEAAGDSRMVVTPWRTVVLRDLDPSASQGFGARLAAVGLVVDPASGWVGVTSCAGRPGCARALADVRRDAARYAAHVQGSTTSVHWSACARRCGRPAGDVVDVIADESGYRVHGGEELPADRWAALSRELASRHESASLQELMSTRAGTSGASTGREGD

SEQ ID NO: 138 - protein, 725 aa, Nostoc sp.
  PEPTIDE (1)..(725): CobG proteinID: AFY47725.1; GeneID: 14091526
MLAGSTPCPGLFYATPAQDGILSRIRIPGGIINSKQCQAIADIADKYGGGYVDVTNRANLQIREIHQGIDAQTLQQLQQLGIGSHNASVDQIRNIMTSPTAGIDPQELIDTRPYVESWDKYITAHPTLSELSPKFSVCFDGGGLVSVCDRPNDITLAAVTIDNKIYFRLYITAGAKGQPPTATDIILHPEQTLKVLATFTDIYLSLCVYPTGTSPANGPLCEKNHPHTQRKPRLRQIINHIGLDNYLREVEQKLPFPLQRIDLTPLPPSLRGKGELETIFSPLVVKEGLGERSKTQYHHIGIHPQRQPGLYYIGLVLPLGRLETKQLRGLAKLSAKYGDGTLRLTPWQNVLLTDIPQHQLTDVQTEITDLKLDASPTNIKSALVACSGNQGCASAATDTKTHALAVAEYLQSRITLENPVNIHFSGCDKSCAQHTQSDIALVGVSEERYQLYVGTGENNQKFGRELYQDVSFTDLPALMEKILNVYKNKRLNSAESFGEFANRHTPNQLKQLLSRPSMPDYIRNANEIYRNSFAIIRAEANLDILPSDVAKVAVRLIHACGMTDIVTDIGYSTTAVNSARKAIAAGAPILCDCRMVADGVTRKRLPANNAVICTLNEPEVPELAKKLGNTRSAAALELWKPYLEGAIVAIGNAPTALFRLLEMLDAGCPKPAVILGFPVGFVGAAESKAALAADSRNVPFLTLHGRRGGSAIAAAAVNALATEEE

SEQ ID NO: 139 - protein, 460 aa, Rhizobium leguminosarum
  PEPTIDE (1)..(460): CobG proteinID: AFY47725.1; GeneID:4404721
MSIKAAKASDRTGEADLHGRPAATMRRRGACPALAAPMATGDGLLVRLRPVGGALTLSQFASLARSAAAHGNGILEITARGNLQIRGLRAETVGQLAADIDAAGITVPEGPAIETSPLHGIDPEEISDPAVMEMALRATLHDLFASPRLAPKLSLIVDGGGSFGLSALSADIRVVAQFGADWLVAINGDGETAMPVAIGPAEAAISAVGEILSLLATLGQGRRARDIDATLLRARFPAMDGIQFISSRAAVMPLAGSHRLDDGKIILGVRPEFGQMRASDLVALLDLAKARGATAIRLAPGRGFFLIGLSDDAVLAMQIAAARHGFSSQPGENTEHIAACAGAGACGSAFYETRTLARRLIAAAPALFDGSLTLHLSGCAKGCAHARPALTLTGSAEGYGLILNGLAADQPDERIAGGRIDFAIERLARSIEDNKDAGESTAACLTRLGAIGVSKALRQE

SEQ ID NO: 140 - protein, 464 aa, Mycoplana dimorpha
  PEPTIDE (1)..(464): CobG proteinID: YP_001328483.1; GeneID:5323688
MIAAVDAGCDTDRSTAASGSISALRRGACPSLTAPMRTGDGLLVRLRPARPGIAPSDWIEIARLAAAHGNGLLEVTARGNLQVRGLTEQSVPKLAAGLAEAGIDLHSGVAVETPALSGIDPGEIADANPPAAAIRAAITACRPPLLLAPKLSIVVNGGGRLDLSAMVADVRLDAVRRDGALFWRLAAGGTLRSARPIAVVADRDAVAAVLAVLEALHGLGPAVRGRDVDVDAVRRQLGSMALPAEAAGATAPPASPIGRRGFGDTEILGLGLAYGQTSAARLEALMRGLQALGATEVRLAPQRALLVLGLAAERIEPAGALAAAEGFWTHADEPGNAIAVCAGAAGCASGHFDTKAAADLLVARGADLLDGSAAVHISGCGKGCAHPSAAALTLVGRADGVALVIGGRAGDATGGVVPADALGTAIDRLTALYRQEKRQGDPARDVLDRIGAAALAKAFQQDLQ

SEQ ID NO: 141 - protein, 374 aa, Rhodobacter sphaeroides
  PEPTIDE (1)..(374): CobG proteinID: CCA92858.1; GeneID:10715321
MNARVAAKGWCPGAWRPMASGDGLIVRVRPVLGRLTAAQVATLCDAAMECGSGMLELTSRANLQLRGVRGEAHEDLLARLWELGLIDADQEAETRRNLLVAPLWQAGDDTESTATALLERLADLPVLPAKFGFAIDAGEAPVLGAASADIRLERGVTGGMILRADGCAKGRPVTAGDAVDEIIRLARWFAETSGTAGRMARHPALREVEGSEPPAPSASLPVPGDTLLGSAWGVAFGQIDADRLARLVTDSGAEALRITPSRVVILEGGKAVGTEGFIGDRSNPLLTTDACPGAPLCGSATVETRKLARALAGHVAGLHVSGCAKGCARARAAPVTLVGRDGRFDLVSDGAAWDAPQRRGMTPAQVLELFGVAR

SEQ ID NO: 142 - protein, 421 aa, Granulicella tundricola?
  PEPTIDE (1)..(421): CobG proteinID: ADW71221.1; GeneID:10205961
MRLGENFCPGILHAVPAKDGQLIRIRVPGGLISAAQLAAVASLAASHANGEIELTSRSNLQLRAIQPSSLPYIVTTLTEAGLLPSSAHDRVRNLVTSPFAGIDPAASLDTRPLIRALDQRLIANDLFLQLHPKFTFGIEANPTRFTYEVEDLGLQAFDSTHRLSLSLAGKDTGCSVAPEDAVVCLLTAAEACIDLAKQHNVPVRTKRLTAIPGVLETLLKTLSPLLEPTTNPARGPDVRRDVIGPHPALTPGHLNLVPSIPLGHLTASQATNIATLATQHNADLHLAPWRGIVLGNLTPKAAALIAPQLAALGLPLDATNGFEGIAACAGISRCDASLADVRADAARLATYLATRPHIPGWTIHLSGCEKQCALRHSASAALIATPAGYTLRLPNHPEAHSLPSAAAIASILQSHTEALAS

SEQ ID NO: 143 - protein, 455 aa, Sinorhizobium meliloti
  PEPTIDE (1)..(455): CobG proteinID: NP_387030.1; GeneID:1234601
MTSCAAPRADRSATGTSMRRGSCPSLAAPMQTGDGLLVRLRPAGDGLTPAEMRAIAGAAARCGSGVIEVTARGNLQIRGLTPESVPALAEAIGAAEIAIAEGVAIETPPLAGFDPDEIADPRPLARALRVAISGAGEALRLAPKLSIVVDGGGRFHLGSLTADLRVSALAHEGGVRWLFSLGGTARSAKPVALLESKDIVPMVLEILGDLTARGPASRARELDADLLRQRAAAGDALPRVDGPVFSPPPAGIHHFGGAGTVLGIGLAFAQTDAGSLVAFLRQAEELGANEIRLAPPHGLFVLGLSGETAAVAQRLASAHGFLVASGDPRNHIATCAGLACASARMDTKAMARLLLEAAPDLLDGSATVHLSGCPKGCASPTASPLTLVGAPSGYALVVNGTASVAPSAYRDENGIGSAFGALNALVRENKDAGESALSCLTRLGTARIAAAFEQG

SEQ ID NO: 144 - protein, 442 aa, Streptomyces cattleya
  PEPTIDE (1)..(442): CobG proteinID: CCB72431.1; GeneID:12645339
MAGSTPGAIIGMLAAMSTASTPPSSQAAAVSRDRGDACPGALRLHAADDGALARVRLPGGVLTTRQAEALGSAALRLGDGDLHLTSRGNVQLRGLPAGCGAELAGLLEAAGLLPSPGHERVRNVVASPLSGLDGHGLRDVRPWLTGLDALLCASEAARELSGRFLFALDDGRGDVAGLGADVTVRAVPDGDALVRLGASGTALRVPGGQAARATLTAAEVFLDAARASGTRAWRVAELALPAEELTAALGRRLTADGINHATGVPEATGTGGPLPGVTGDALSVHVPLGRLSAAQWRELTRAARGELRLTPWRGVVLPAPGLTPERAADALARLRAVGLVTDPDSPWPRVGACVGRPGCARSRADVRTDAAAALDAAGLPGLPLYWSGCERRCGHPVGDRIDVVAAEDGGYRVSVTASGRAPRTATVDHPSRLATVLAAITS

SEQ ID NO: 145 - protein, 457 aa, Pannonibacter phragmitetus
  PEPTIDE (1)..(457): CobG proteinID: WP_058898234; GeneID:34095435
MSALKTPALAVGEAPRVPVRRGACPSLAAPMATGDGLLVRLRPQAPGLSPAEWMTMAGLARRTGNGLLEVTARGNLQIRGLTPESAAPLAEGLQAAGIVTRTGTAIEVPPLSGLDPSETADATELAEAIRQGIASHVPPLALAPKLAITVNGGGCFNLSTASADIRLDAVKAEGGVLWRLALAGDAGSAKPVALLPEEAAVARVMELLRALSQRGGHARGRDIAPDIEGSEDGAGPEAGFPAPVRPAGVIRSGALLVLALRLAYGRIHADELEALMAGLQHLGATEIRLAPDHALLVLGLTDETVEAAAALAGAQGLITSPSDPAHFISACPGTGFCAAARINTRQLAECLISAASAAEPGVLDGSCRVHVSGCSKGCAHPQAAALTVTGTEQGAAIVLGGRADSRPDLQLSPQRLETVLPRLQRGIELNRQPGQTAQHVLGASGAAILAMAGAERA

SEQ ID NO: 146 - protein, 246 aa, Pseudomonas denitrificans
  PEPTIDE (1)..(246): CobI proteinID: WP_015475358; GeneID:32564472
MTGRLIGLGVGPGDPELLTLKALRLLRASPVIGYFVAKAKHHAGQGGNAFAIIEQHLLDEQQRLPLVYPVTTEKLEPPLTYEGVISDFYDTAAAQVAAHLDANRDVAVICEGDPFFYGSYMYLHDRLSQRYATEVVPGVCSMLGSAAVLGVPLVYRNQSLAVLSGVLPEDELKRRLADADAAVVMKLGRNFDKVRRVLRELGRDGGAHYVERATMREQRIVALDEVDPMASPYFSMIVIPGQRWNG

SEQ ID NO: 147 - protein, 251 aa, Pseudomonas denitrificans
  PEPTIDE (1)..(251): CobM proteinID: WP_015475374; GeneID:32564987
MTVYFIGAGPGDPELITVKGQRLIRTCPVILYAGSLVPPAVLEGHSAERVVNTAELNLEEIVELLTQAHAEGKDVARVHSGDPSLYGAIGEQIRHLRERGIPYEIIPGVTATSACAAILGCELTLPEISQTLILTRYASRTRMPEGESLAELAQHQATLAIHLGIGQLANIVAELLPHYGADCPVAVIHRASWPDQDQVTGTLGDILPKAQAKGFRRTALILVGKVLGAEGFADSSLYSTGHTHLYRGGTL

SEQ ID NO: 148 - protein, 367 aa, Pseudomonas denitrificans
  PEPTIDE (1)..(365): CobF proteinID: WP_015475362; GeneID:32562474
BKMREETPEEPRPLRSGYTTGSCATATSLAAARLLLTGVASDAAQIVLPKERSATLRLEFCRLTVDGAEAGTLKDAGDDPDVTHGALVFVRVALSAEPGVRFHAGEGVGTVTKPGLVLAVGEPAINPVPRQMMRDNLAVLAAECGYAGGFDVTINIEGGAELALKTMNPRLGILGGLSILGTTGIVRPFSCSAYIASIQQGIDVARANGFRHLAACTGNASEDAMRRRYGFDDTALIEMGDFAGAALKHLRKVPVERFSVCGGFGKISKLAAGHMDLHSRHSSIDLPQLAEWAAEIGASAELQQRMRAANTSQQALALCRAEGIALGDAVCARALAFARRIVPVEVVLEVFAIDRQGNLVGEALEVR

SEQ ID NO: 149 - protein, 242 aa, Pseudomonas denitrificans
  PEPTIDE (1)..(242): CobK proteinID: WP_015475363; GeneID:32562213
MKRVLLLGGTGEALAIARRLGPRHLYSLAGLGKVPDDLACEVRVGGYGGAEGLAAFIREQGFELLLDATHPYAAQISANAARAAQLAGVPCWALRRPGWQAGAEDDWREVADWPALIAALEPFHRPLFTMGREPLEHLDETPAHQYWTVRCLQSLSGNERAEVLGARGPFSLDGERELFTRLGTDVLVSKNSGSQATEPKLQVARERGVPVLILARPTLPAVEREFDSLDSLWQALELLAAD

SEQ ID NO: 150 - protein, 208 aa, Pseudomonas denitrificans
  PEPTIDE (1)..(208): CobH proteinID: WP_015475359; GeneID:32562573
MLDYIRDGQAIYRQSFATIRAEAELSAIPADLEKLAVRVIHACGMVDVVQDLRFSAGAGAIGRAALAAGAPILCDARMVAEGITRARLPAHNEVICTLNDPDVPALARELGNTRSAAALEHWREHLEGSVVVIGNAPTALFYLLEMLDAGAPKPALILGFPVGFVGAMESKDALAADSRGVPYVIVRGRRGGSAMAAAAVNALATEVE

SEQ ID NO: 151 - protein, 403 aa, Pseudomonas denitrificans
  PEPTIDE (1)..(403): CobL proteinID: WP_015475361; GeneID:32564183
MTPWLTIVGIGEDGYAGLGKAARRALLAASEVIGAPRQLALLPHCLRASRQAWPSPFSLEPVLRRRGEPTCVLASGDPMLFGVGASLSRQIPPEEMQVISAPSSAALAAARLGWALQDCTLLSLLARPLAALNAQLHHGAKLLVLSNDGESPAAIAALLRERGFGPSRICVLEHLGGESERRMDGLASDWSPSETAALNIVAVQCVAGSDAVRLPLTIGLPDEAYRHDGQLTKRDVRAVTLARLAPTPGELLWDVGAGCGSIGIEWMRAHPSCRTLAIEANDGRQEHIRFNRDALGVPALQLVCGAAPDALQGLERPEAIFIGGGVTVPGVFERCWDQLKPGGRLVANAVTLQSEALLVSWRERIGGELTRLSVAQAQPLGGFDTWRAALPITLLEVHKPLAD

SEQ ID NO: 152 - protein, 549 aa, Pseudomonas denitrificans
  PEPTIDE (1)..(549): CobJ proteinID: WP_0154753571; GeneID:32561669
MRIAIVILGQGALATARRLQGIYPQARVLGLKDRVEGADESYANFGETLRQLYRDDTPIIALCAAGIVIRTLAPLLAEKGAEPPVLAVAEDGSAVVPLLGGLGGVNRMAREMAAALDIAPAITTSGELRFGACLLDPPPGYALADIEQGKRFVSDLLGGDTLRIEGDALWLDELDLPLADDAAHTLRIDSRAEGIAHNELRIHPRIVLAHVTLVDSQLPERIRQGLAQAGLAEVSLAALVAPRCRMADPALAEAARELGVPLRFIHSDDELPPAMLHGDSFHLHRTATPGEAEGIGQPRGRLSVIGLGPGASDFMIPAVRHALDEAQDLLGYETYVNMAEPLRDDQVRHCTDNREEMQRARHAFELAASGRRVVVISSGDPGVFAMGAAVMEALHGSDDPDWHGVELEVLPGVSAALAAAAKAGAPLGHDFCLISLSDNLKPWETIEKRLDHAGAADLVMAFYNPISRARPWQLGRALEIVRRHRTPETLVVLGRDIGRPAEALRVVPLGELVPEMVDMRTLVIVGSSLTRRFPRAGGGDWVYTPRWYR

SEQ ID NO: 153 - protein, 1263 aa, Brucella melitensis
  PEPTIDE (1)..(1263): CobN proteinID: ACO01076.1; GeneID:7677080
MHLLLAQKGTISDGNEAVDLGQTPGEIVFLSAADTELASIAQAHRLAPDMPSLRLANFLGLTHPMSVDAYVERTARHAKLIVVRIIGGETYWPYGLEALHACAITHGAKMAVLPGDDKPDHGLDRFSTIPAGERDDLWHYLIESGAANTHGFLAYCKALISGCEKPEAAAPLLKAGLWWPGEAVSSLTSVQRHWADPAAPVAAIILYRALVQSGQTQPVDALIAALQARGLNPLPIFVSSLKDPLSAAVVDGLFEDCPPDIVLNATGFAISSPGAERKPTVLDKRGNMVLQVIFSGTPKTVWEASQQGLLARDLAMNVALPEVDGRVLSRAVSFKSAQQFDASVEANIVTHEPHPDRVAFVAELAANWVRLKRKPPAERRVALILANYPNRDGRLGNGVGLDTPAGTVEVLRAMAAEGYRVGEIPADSDALMRALMAGPTNAARDGREIRETISLNQYKALFGKLALTIQAEVEARWGAPENDPYFARELDAFALPLMRFGETFVGIQPARGYNIDPKETYHSLDLVPPHGYIAYYAYLRAVAGVDAVVHMGKHGNLEWLPGKALALSQNCYPEAVFGPMPHIYPFIVNDPGEGTQAKRRASAVIIDHLTPPLTRAESYGPLKDLEALVDEYYEASGVDPRRLLRLKAQILDLVRDIGLDRDAGIHDHDDEDMALQKLDAYLCDLKEMQIRDGLHVFGLAPQARLLTDLLVALARVPRGIPVSLGGAPGDQSLQRAIAADAGLGEGFDPLDCNMAEPWAGAKPDMLLAASPATWRIAGDTVERIEILAAQLVAGEVPCPEDWTQTRAVLQSIEEQLRPMVVSCGPSEIDGFLAALSGRFVPPGPSGAPTRGRPDVLPTGRNFFSTDSRAVPTPAAWELGKKSAELLITRYTQDHGEWPTSFGLTAWGTSNMRTGGDDIAQALALIGVQPVWDMASRRVTGYEIVPPAKLARPRVDVTLRISGFFRDAFPEQIALFDKAVRAVGALDEDVEDNPIAARMKAEQARLVAGGADPQTAERRAGYRVFGSKPGAYGAGLQALIDENGWAGRNDLAEAWLVWGGYAYGAGEEGQAERGLLEERLRSVQAVVQNQDNREHDLLDSDDYYQFEGGMAATVESLTGAMPSVYHNDHSRPEKPVIRALEEELSRVVRGRAANPKWIAGVMRHGYKGAAEIAATVDYLFAFAATTGKVGNHHFEAVYQAYIADRAVHDFMAEKNPAALAETAAKLNEAIERGFWTPRSNSARFELENLSVHLQKLNPERAING

SEQ ID NO: 154 - protein, 328 aa, Brucella melitensis
  PEPTIDE (1)..(328): CobS proteinID: AAL512311; GeneID:1195761
MNKVERDIANLPDTTVSVREVFGIDSDMMVPAYAAGDSYVPELDPDYLFDRQTTLAILAGFAYNRRVMVSGYHGTGKSTHIEQVAARLNWPCVRVNLDSHVSRIDLVGKDAIVVKEGVQVTEFKDGILPWAYQHNVALVFDEYDAGRPDVMFVIQRVLESSGRLTLLDQSRVIRPHPAFRLFATANTVGLGDTTGLYHGTQQINQAQMDRWSIVTTLNYLPHDNEVNIVLVKAKHYQNAEGREIVNKMVRVADMTRQAFINGDLSTVMSPRTVITWAENAAIFNDVGFAFRLTFLNKCDELERATVAEFYQRAFGVELPESAANIVLA

SEQ ID NO: 155 - protein, 632 aa, Brucella melitensis
  PEPTIDE (1)..(632): CobT proteinID:WP_004686229; GeneID:29594975
MSGIGDNSRDRKTGPVDSEPFKRAITACVRAISGDHEMEVAFSHDRPALSANRARLPDLPKRPTAHDIAVTRGLGDSMALRQARHNPRIHAALAPEGKQARAIFDAVEQARVEAIGARAMAGVADNLSTMLADKYSRANFSAVTTKEDAPLEEAVSLLLREKLTGRPAPAEAGQVLELWRDWIEQKASADIARLGENLEDQQAFARTVRDMLASMDMAEELSQEEPSDDEEQNDEQTPDSDENEEGGDENQEGSDSAESEESDSSSDEGEQGEMDAADASADEMDDSEDIDAETPGDTRRPNQPFANFAEHVDYKVFTREFDEEVEATDLCDEAELDRLRGFLDKQLANLQGVVGRLANRLQRRLMAQQNRSWDFDLEEGYLDSARLVRIVIDPTQPLSYKQERDTDFRDTVVTLVLDNSGSMGRPITVAATCADILARTLERCGVKVEILGFTTKAWKGGQSREAWLGRGKPANPGRLNDLRHIVYKSADAPWRRARRNLGLMMREGLLKENIDGEALIWAHQRLLGRPEQRKILMMISDGAPVDDSTLSVNPGNYLERHLRAVIEEIETRSPVELIAIGIGHDVTRYYQRAVTIVDAEELAGAMTEQLASLFEEQGAAASVRGRRRAGRR

SEQ ID NO: 156 - protein, 173 aa, Brucella melitensis
  PEPTIDE (1)..(173): CobR proteinID:WP_004683949; GeneID: 29593512
MQTVNNIISSVSTVESKAYRDAMSHYAGAVQIVTTAGAAGRRGLTLTAACSVSDNPPTILICLQKIHEENRIFIENGVFAINTLAGPHQQLADAFSGRIGLTQDERFELAAWEILATGAPVLKGALAAFDCRVVSVQDHSTHHVLFGEVVGLSSHAEEEALIYLNRRYHKLEL

SEQ ID NO: 157 - protein, 203 aa, Pseudomonas denitrificans
  PEPTIDE (1)..(203): CobO proteinID:WP_0154783229; GeneID: 32561033
MSESPEKDERHRSRMQRKKTVVDEKIAQAQGERGVFLVHSGNGKGKSSSAFGMVARALGHGMKVGVVQFIKGAATTGEEAFFRRFPEEVSYHVMGEGFTWETQDRQRDIAKAREAWDVARQLLGDPQVGLVVLDEVNIALKHGYLALDSVLADIAARPPMQHVVATGRGVLPAMVEAADTVTEMGLVKHAFKAGIKAQKGVEF

SEQ ID NO: 158 - protein, 504 aa, Pseudomonas denitrificans
  PEPTIDE (1)..(504): CobQ proteinID:AGI25465; GeneID: 14997723
MTSPTGQAERLMDQGATLMVQGTTLMVQGTTSDAGKSTLVTALCRWLRRQGVAVAPFKPQNMALNSAVTADGGEIGRAQAVQAQACGLAPHTDMNPVLLKPNSDIGAQVVIHGRAVTSMNAAAYHDYKRVAMQAVLESHARLAAQYPVVMVEGAGSPAEINLRTNDIANMGFAEAVDCPVILVADIDRGGVFAHLVGTLELLSVSERARVKGFVINRFRGDIALLQNGLDWLEQRTGVPVLGVLPYLMDFHLEAEDAIDLRQTAKSGECLRVAVPVLPRISNHTDFDPLRLHPQVELSFVGPGQPRPPTDLIILPGSKSVRADLAFLREQGWDTAIQRHLRYGGKLLGICGGLQMLGQTLADPHGLEGAAGESDGLGLLDFRTVLEPEKQLRNVRGRLALEDAEVAGYEIHAGVSEGPALECPAVRLGDGRADGAVSADGQVLGTYLHGLFESPAACSALLRWAGLREVRSIDYHALRERDIERLADQVEAHLDTARLKALCGL

SEQ ID NO: 159 - protein, 196 aa, Escherichia coli
  PEPTIDE (1)..(196): BtuR proteinID:NP_415786.1; GeneID: 945839
MSDERYQQRQQRVKEKVDARVAQAQDERGIIIVFTGNGKGKTTAAFGTATRAVGHGKKVGVVQFIKGTWPNGERNLLEPHGVEFQVMATGFTWDTQNRESDTAACREVWQHAKRMLADSSLDMVLLDELTYMVAYDYLPLEEVVQALNERPHQQTVIITGRGCHRDILELADTVSELRPVKHAFDAGVKAQIGIDY

SEQ ID NO: 160 - protein, 181 aa, Escherichia coli
  PEPTIDE (1)..(181): CobU proteinID:NP_416497.1; GeneID: 946519
MMILVTGGARSGKSRHAEALIGDSSQVLYIATSQILDDEMAARIEHHRQGRPEHWRTVERWQHLDELIHADINPNEVVLLECVTTMVTNLLFDYGGDKDPDEWDYQAMEQAINAEIQSLIAACQRCPAKVVLVTNEVGMGIVPESRLARHFRDIAGRVNQQLAAAANEVWLVVSGIGVKIK

SEQ ID NO: 161 - protein, 364 aa, Salmonella typhimurium
  PEPTIDE (1)..(364): CobD proteinID:NP_459636.1; GeneID: 1252164
MALFNSAHGGNIREAATVLGISPDQLLDFSANINPLGMPVSVKRALIDNLDCIERYPDADYFHLHQALARHHQVPASWILAGNGETESIFTVASGLKPRRAMIVTPGFAEYGRALAQSGCEIRRWSLREADGWQLTDAILEALTPDLDCLFLCTPNNPTGLLPERPLLQAIADRCKSLNINLILDEAFIDFIPHETGFIPALKDNPHIWVLRSLTKFYAIPGLRLGYLVNSDDAAMARMRRQQMPWSVNALAALAGEVALQDSAWQQATWHWLREEGARFYQALCQLPLLTVYPGRANYLLLRCEREDIDLQRRLLTQRILIRSCANYPGLDSRYYRVAIRSAAQNERLLAALRNVLTGIAPAD

SEQ ID NO: 162 - protein, 203 aa, Escherichia coli
  PEPTIDE (1)..(203): CobC proteinID:NP_415171.1; GeneID: 945246
MRLWLIRHGETQANIDGLYSGHAPTPLTARGIEQAQNLHTLLHGVSFDLVLCSELERAQHTARLVLSDRQLPVQIIPELNEMFFGDWEMRHHRDLMQEDAENYSAWCNDWQHAIPTNGEGFQAFSQRVERFIARLSEFQHYQNILVVSHQGVLSLLIARLIGMPAEAMWHFRVDQGCWSAIDINQKFATLRVLNSRAIGVENA

SEQ ID NO: 163 - protein, 359 aa, Escherichia coli
  PEPTIDE (1)..(359): CobT proteinID:NP_416495.1; GeneID: 946517
MQILADLLNTIPAIDSTAMSRAQRHIDGLLKPVGSLGKLEVLAIQLAGMPGLNGIPHVGKKAVLVMCADHGVWEEGVAISPKEVTAIQAENMTRGTTGVCVLAEQAGANVHVIDVGIDTAEPIPGLINMRVARGSGNIASAPAMSRRQAEKLLLDVICYTQELAKNGVTLFGVGELGMANTTPAAAIVSTITGRDPEEVVGIGANLPTDKLANKIDVVRRAITLNQPNPQDGVDVLAKVGGFDLVGIAGVMLGAASCGLPVLLDGFLSYAAALAACQMSPAIKPYLIPSHLSAEKGARIALSHLGLEPYLNMEMRLGEGSGAALAMPIIEAACAIYNNMGELAASNIVLPGNTTSDLNS

SEQ ID NO: 164 - protein, 247 aa, Escherichia coli
  PEPTIDE (1)..(247): CobS proteinID:NP_416496.1; GeneID:946520
MSKLFWAMLSFITRLPVPRRWSQGLDFEHYSRGIITFPLIGLLLGAISGLVFMVLQAWCGAPLAALFSVLVLVLMTGGFHLDGLADTCDGVFSARSRDRMLEIMRDSRLGTHGGLALIFVVLAKILVLSELALRGESILASLAAACAVSRGTAALLMYRHRYAREEGLGNVFIGKIDGRQTCVTLGLAAIFAAVLLPGMHGVAAMVVTMVAIFILGQLLKRTLGGQTGDTLGAAIELGELVFLLALL

SEQ ID NO: 165 - protein, 319 aa, Salmonella typhimurium
  PEPTIDE (1)..(319): CbiB proteinID:NP_460979.1; GeneID:1253555
MTILAWCIAWVLDFIIGDPQHWPHPVRWIGRLITFVQRIVRRYCPGDKALRIGGGVMWVVVVGATWGVAWGVLALAQRIHPWFGWSVEVWMIFTTLAGRSLAHAAQEVERPLRKNDLAESRIKLSWIVGRDTSQLQPAQINRAVVETVAENTVDGIIAPLFFLFLGGAPLAMAYKAVNTLDSMVGYKHEKYRAIGMVSARMDDVANYLPARLSWLLLGIAAGLCRLSGWRALRIGWRDRYNHSSPNCAWSEACVAGALGIQLGGPNNYFGERVDKPWIGDAQRDISVDDISRTIRLMWVASTLALALLIAARCGLSGVA

SEQ ID NO: 166 - protein, 300 aa, Salmonella typhimurium
  PEPTIDE (1)..(300): PduX proteinID:NP_461003.1; GeneID:1253579
MRAHYSYLKGDNVAVAQCPASCGELIQGWILGSEKLVSCPVDWYSTVAVTAAPPLINERPLSRAMVERVLAHWQYPAHWSNEIRVDVRSSIPVAKGMASSTADIAATAVATAHHLGHSLDETTLAQLCVSIEPTDSTVFHQLTLFDHNNAATQIACEPPPPIDLLVLESPVTLRTQDYHRLPRQQKLIASSATLQQAWNLVQEACITQNPLRLGEAATLSAIASQTLLPKPGFTALLSLVEECDLYGLNVAHSGSVVGLMLDRKRHDIARLKGKLAEKKLTRHWPKQHLLKMVTGGVKLQ

SEQ ID NO: 167 - protein, 93 aa, Salmonella typhimurium
  PEPTIDE (1)..(93): CbiN proteinID:NP_460967.1; GeneID:1253543
MKKTLMLLAMVVALVILPFFINHGGEYGGSDGEAESQIQAIAPQYKPWFQPLYEPASGEIESLLFTLQGSLGAAVIFYILGYCKGKQRRDDRA

SEQ ID NO: 168 - protein, 225 aa, Salmonella typhimurium
  PEPTIDE (1)..(225): CbiQ proteinID:NP_460966.1; GeneID:1253542
MTGLDRLSYQSRWAHVAPQRKFLLWLAMMILAFVLPPVGQGIELLIIAGLSCWLLRISLWRWCRWMAIPFGFLLVGVITIIFSISREPQMLLAGISVGPYWIGITRAGVVTANETFWRSLTALSATLWLVMNLPFPQLISLLKRAHIPRLLTEQILLTWRFLFILLDEAVAIRRAQTLRFGYCSLPNGYRSLAMLAGLLFTRVLMRYQQMTTTLDIKLYQGDFHL

SEQ ID NO: 169 - protein, 245 aa, Salmonella typhimurium
  PEPTIDE (1)..(245): CbiM proteinID:NP_460968.3; GeneID:1253544
MKLEQQLRQLSFSGLAAALLLMVVPQQAFAMHIMEGFLPPVWALAWWLLFLPCLWYGLVRLRRIVQEDNHQKVLLALCGAFIFVLSALKIPSVTGSCSHPTGVGLAVILFGPGVVAILGAVVLLFQALLLAHGGLTTLGANGMSMAVIGPVVGYLVWKMACRAGLRRDVAVFLCAMLADLATYFVTSVQLGVAFPDPHAGATGSVVKFMGIFCLTQIPVAIAEGLLTVMIYDQLTKRQVITVQGH

SEQ ID NO: 170 - protein, 271 aa, Salmonella typhimurium
  PEPTIDE (1)..(271): CbiO proteinID:NP_460965.1; GeneID:1253541
MLATSDLWFRYQNEPVLKGLNMDFSLSPVTGLVGANGCGKSTLFMNLSGLLRPQKGAVLWQGKPLDYSKRGLLALRQQVATVFQDPEQQIFYTDIDSDIAFSLRNLGVPEAEITRRVDEALTLVDAQHFRHQPIQCLSHGQKKRVAIAGALVLQARYLLLDEPTAGLDPAGRTQMIAIIRRIVAQGNHVIISSHDIDLIYEISDAVYVLRQGQILTHGAPGEVFACTEAMEHAGLTQPWLVKLHTQLGLPLCKTETEFFHRMQKCAFREAS

SEQ ID NO: 171 - DNA, 1851 bp, Escherichia coli
  CDS (1)..(1851): IlvD gene encoding dihydroxy-acid dehydratase
atgcctaagtaccgttccgccaccaccactcatggtcgtaatatggcgggtgctcgtgcgctgtggcgcgccaccggaatgaccgacgccgatttcggtaagccgattatcgcggttgtgaactcgttcacccaatttgtaccgggtcacgtccatctgcgcgatctcggtaaactggtcgccgaacaaattgaagcggctggcggcgttgccaaagagttcaacaccattgcggtggatgatgggattgccatgggccacggggggatgctttattcactgccatctcgcgaactgatcgctgattccgttgagtatatggtcaacgcccactgcgccgacgccatggtctgcatctctaactgcgacaaaatcaccccggggatgctgatggcttccctgcgcctgaatattccggtgatctttgtttccggcggcccgatggaggccgggaaaaccaaactttccgatcagatcatcaagctcgatctggttgatgcgatgatccagggcgcagacccgaaagtatctgactcccagagcgatcaggttgaacgttccgcgtgtccgacctgcggttcctgctccgggatgtttaccgctaactcaatgaactgcctgaccgaagcgctgggcctgtcgcagccgggcaacggctcgctgctggcaacccacgccgaccgtaagcagctgttccttaatgctggtaaacgcattgttgaattgaccaaacgttattacgagcaaaacgacgaaagtgcactgccgcgtaatatcgccagtaaggcggcgtttgaaaacgccatgacgctggatatcgcgatgggtggatcgactaacaccgtacttcacctgctggcggcggcgcaggaagcggaaatcgacttcaccatgagtgatatcgataagctttcccgcaaggttccacagctgtgtaaagttgcgccgagcacccagaaataccatatggaagatgttcaccgtgctggtggtgttatcggtattctcggcgaactggatcgcgcggggttactgaaccgtgatgtgaaaaacgtacttggcctgacgttgccgcaaacgctggaacaatacgacgttatgctgacccaggatgacgcggtaaaaaatatgttccgcgcaggtcctgcaggcattcgtaccacacaggcattctcgcaagattgccgttgggatacgctggacgacgatcgcgccaatggctgtatccgctcgctggaacacgcctacagcaaagacggcggcctggcggtgctctacggtaactttgcggaaaacggctgcatcgtgaaaacggcaggcgtcgatgacagcatcctcaaattcaccggcccggcgaaagtgtacgaaagccaggacgatgcggtagaagcgattctcggcggtaaagttgtcgccggagatgtggtagtaattcgctatgaaggcccgaaaggcggtccggggatgcaggaaatgctctacccaaccagcttcctgaaatcaatgggtctcggcaaagcctgtgcgctgatcaccgacggtcgtttctctggtggcacctctggtctttccatcggccacgtctcaccggaagcggcaagcggcggcagcattggcctgattgaagatggtgacctgatcgctatcgacatcccgaaccgtggcattcagttacaggtaagcgatgccgaactggcggcgcgtcgtgaagcgcaggacgctcgaggtgacaaagcctggacgccgaaaaatcgtgaacgtcaggtctcctttgccctgcgtgcttatgccagcctggcaaccagcgccgacaaaggcgcggtgcgcgataaatcgaaactggggggttaa

SEQ ID NO: 172 - protein, 616 aa, Escherichia coli
MPKYRSATTTHGRNMAGARALWRATGMTDADFGKPIIAVVNSFTQFVPGHVHLRDLGKLVAEQIEAAGGVAKEFNTIAVDDGIAMGHGGMLYSLPSRELIADSVEYMVNAHCADAMVCISNCDKITPGMLMASLRLNIPVIFVSGGPMEAGKTKLSDQIIKLDLVDAMIQGADPKVSDSQSDQVERSACPTCGSCSGMFTANSMNCLTEALGLSQPGNGSLLATHADRKQLFLNAGKRIVELTKRYYEQNDESALPRNIASKAAFENAMTLDIAMGGSTNTVLHLLAAAQEAEIDFTMSDIDKLSRKVPQLCKVAPSTQKYHMEDVHRAGGVIGILGELDRAGLLNRDVKNVLGLTLPQTLEQYDVMLTQDDAVKNMFRAGPAGIRTTQAFSQDCRWDTLDDDRANGCIRSLEHAYSKDGGLAVLYGNFAENGCIVKTAGVDDSILKFTGPAKVYESQDDAVEAILGGKVVAGDVVVIRYEGPKGGPGMQEMLYPTSFLKSMGLGKACALITDGRFSGGTSGLSIGHVSPEAASGGSIGLIEDGDLIAIDIPNRGIQLQVSDAELAARREAQDARGDKAWTPKNRERQVSFALRAYASLATSADKGAVRDKSKLGG

SEQ ID NO: 173 - protein, 562 aa, Acidobacterium capsulatum
  PEPTIDE (1)..(562): IlvD proteinID: ACO32516.1; GeneID:  7698120
MSSEQNGSAKKNSVALTEGPNRAPARAMLRAIGFTRDDLRKPIIGIANTWTEIGPCNFHLRQIAEAVKQGIREAGGTPMEFNTVTISDGITMGTEGMKASLVSREVIADSIELVTRGNLFDGLVCIAGCDKNLPGTVMALARLDVPGLMLYGGSIAPGHLNGKDLTVQDVFEAVGSHAAGKLDDAGLEAVEANACPGAGACGGQFTANTMAMACEFMGISPMSISGVPAFLPEKLASAKEAGKLVLELAKRDLRPSQLITKESLENAIASVAASGGSTNAVLHFLAIAHERGIALSIDDFDRISEKTPLLCDMKPGGKYVAADYQKAGGSRLLAKRLIEGGYIHSDCLNASGRTLAEEAALAVEEPGQKVIFPATNALKPTGGLVILKGNLAPEGCVIKVAGHSRLTHRGPARVFDREQDAFAAVENGSIQPDDVMVIRYEGPKGGPGMREMLGVTAAIAGIPALSETVALLTDGRFSGATRGLMAGHVSPEAAVRGPIAAVRNGDMIHFDIPNRRLDVELTDAQIEERLKDWKEPAPHFSRGVFKKYVDTVSSAARGAVTN

SEQ ID NO: 174 - protein, 585 aa, Saccharomyces cerevisiae
  PEPTIDE (1)..(585): IlvD proteinID: NP_012550; GeneID:  853473
MGLLTKVATSRQFSTTRCVAKKLNKYSYIITEPKGQGASQAMLYATGFKKEDFKKPQVGVGSCWWSGNPCNMHLLDLNNRCSQSIEKAGLKAMQFNTIGVSDGISMGTKGMRYSLQSREIIADSFETIMMAQHYDANIAIPSCDKNMPGVMMAMGRHNRPSIMVYGGTILPGHPTCGSSKISKNIDIVSAFQSYGEYISKQFTEEEREDVVEHACPGPGSCGGMYTANTMASAAEVLGLTIPNSSSFPAVSKEKLAECDNIGEYIKKTMELGILPRDILTKEAFENAITYVVATGGSTNAVLHLVAVAHSAGVKLSPDDFQRISDTTPLIGDFKPSGKYVMADLINVGGTQSVIKYLYENNMLHGNTMTVTGDTLAERAKKAPSLPEGQEIIKPLSHPIKANGHLQILYGSLAPGGAVGKITGKEGTYFKGRARVFEEEGAFIEALERGEIKKGEKTVVVIRYEGPRGAPGMPEMLKPSSALMGYGLGKDVALLTDGRFSGGSHGFLIGHIVPEAAEGGPIGLVRDGDEIIIDADNNKIDLLVSDKEMAQRKQSWVAPPPRYTRGTLSKYAKLVSNASNGCVLDA

SEQ ID NO: 175 - protein, 555 aa, Aquifex aeolicus
  PEPTIDE (1)..(555): IlvD proteinID: NP_213570.1; GeneID: 1193459
MKFRSDKVKKGIERAPHRALLRACGLSDEDFDKPLIGIANSYIDIIPGHVHLREFVEPIKEEVRKLGGVPIEFNVIGVDDGIAMGHEGMHYSLPSRELIADSIETVVNAHQLDALICIPNCDKIVPGMLMGALRVNVPTVFISGGPMLAGEVNGQKVDLISVFEGIGKVKRGEISEQELKVIEASACPTCGSCSGMFTANSMNCLTEVLGLALPGNGTILAIDPRREILARNAVKALFELLEKDVKPRDIVTEEALDDAFTVDIAMGGSSNTILHLLAIAREAGIEYNLAKINEISKRTPTICKISPASHYHIEDLDRVGGIPTIMKELSKLGLLHTERKTVSGKTIGEIISDAPDADGEVVRTIENPYSKDGGIAILFGNLAPEGAVVKTAGVDPKMLTFKGKAICFDSEEEAIEGILGGKVKPGHVVVIRYEGPKGGPGMREMLSPTSAIMGMGLGDKVALITDGRFSGGTRGACVGHISPEAAAGGPIGIVKDGDEILIDIPNRRIELLISEEEFNERMKNFKPKQKEIKSSWLRRYAKLVTSASKGAILEA

SEQ ID NO: 176 - protein, 558 aa, Bacillus subtilis
  PEPTIDE (1)..(558): IlvD proteinID: NP_390070.2; GeneID: 939084
MAELRSNMITQGIDRAPHRSLLRAAGVKEEDFGKPFIAVCNSYIDIVPGHVHLQEFGKIVKEAIREAGGVPFEFNTIGVDDGIAMGHIGMRYSLPSREIIADSVETVVSAHWFDGMVCIPNCDKITPGMLMAAMRINIPTIFVSGGPMAAGRTSDGRKISLSSVFEGVGAYQAGKINENELQELEQFGCPTCGSCSGMFTANSMNCLSEALGLALPGNGTILATSPERKEFVRKSAAQLMETIRKDIKPRDIVTVKAIDNAFALDMALGGSTNTVLHTLALANEAGVEYSLERINEVAERVPHLAKLAPASDVFIEDLHEAGGVSAALNELSKKEGALHLDALTVTGKTLGETIAGHEVKDYDVIHPLDQPFTEKGGLAVLFGNLAPDGAIIKTGGVQNGITRHEGPAVVFDSQDEALDGIINRKVKEGDVVIIRYEGPKGGPGMPEMLAPTSQIVGMGLGPKVALITDGRFSGASRGLSIGHVSPEAAEGGPLAFVENGDHIIVDIEKRILDVQVPEEEWEKRKANWKGFEPKVKTGYLARYSKLVTSANTGGIMKI

SEQ ID NO: 177 - protein, 613 aa, Corynebacterium glutamicum
  PEPTIDE (1)..(613): IlvD proteinID: WP_003854128; GeneID: 23503185
MIPLRSKVTTVGRNAAGARALWRATGTKENEFGKPIVAIVNSYTQFVPGHVHLKNVGDIVADAVRKAGGVPKEFNTIAVDDGIAMGHGGMLYSLPSREIIADSVEYMVNAHTADAMVCISNCDKITPGMLNAAMRLNIPVVFVSGGPMEAGKAVVVDGVAHAPTDLITAISASASDAVDDAGLAAVEASACPTCGSCSGMFTANSMNCLTEALGLSLPGNGSTLATHAARRALFEKAGETVVELCRRYYGEEDESVLPRGIATKKAFENAMALDMAMGGSTNTILHILAAAQEGEVDFDLADIDELSKNVPCLSKVAPNSDYHMEDVHRAGGIPALLGELNRGGLLNKDVHSVHSNDLEGWLDDWDIRSGKTTEVATELFHAAPGGIRTTEAFSTENRWDELDTDAAKGCIRDVEHAYTADGGLVVLRGNISPDGAVIKSAGIEEELWNFTGPARVVESQEEAVSVILTKTIQAGEVLVVRYEGPSGGPGMQEMLHPTAFLKGSGLGKKCALITDGRFSGGSSGLSIGHVSPEAAHGGVIGLIENGDIVSIDVHNRKLEVQVSDEELQRRRDAMNASEKPWQPVNRNRVVTKALRAYAKMATSADKGAVRQVD

SEQ ID NO: 178 - protein, 607 aa, Deinococcus radiodurans
  PEPTIDE (1)..(607): IlvD proteinID: NP_294856.1; GeneID: 1797568
MPTYRSRTTTEGRNMAGARALWRATGMTDGDFQKPIIAVVNSFTQFVPGHVHLKDLGQLVAGEIAAAGGVAKEFNTIAVDDGIAMGHDGMLYSLPSREIIADSVEYMVNAHCADAMVCISNCDKITPGMLMAALRLNIPTVFVSGGPMEAGKVKLGDGEHALDLVDAMVMAADDSVSEEDIELVERSACPTCGSCSGMFTANSMNCLTEALGLSLPGNGSVLATHSDRQNLFKRAGHLIVDLAKRYYEGDDESVLPRSVATYDAFENAMTLDISMGGSTNTVLHLLAAAHEAGVDFTMQDIDQLSRRVPVLCKVAPAKNDVHMEDVHRAGGIMGILGELDRAGLLKTDVSTVHAPSMSAALNEWDVVRNENHHEFYRAAPGGIPTVFAFSQSRRYRELDTDREAGVIRSAEHAFSQDGGLAVLYGNLAEDGCIVKTAGVDESILKFSGPARVFESQDASVDAILSGEVKEGEVVLIRYEGPRGGPGMQEMLYPTSYLKSKGLGKACALVTDGRFSGGSSGLSIGHVSPEAAEGGTIGLVETGDLIEIDIPNRTIHLAVPDAELAARRQKREEEGWHPAEPRPRKITAALRAYASMTTSASRGAVRNI

SEQ ID NO: 179 - protein, 550 aa, Methanococcus maripaludis
  PEPTIDE (1)..(550): IlvD proteinID: WP_011170262; GeneID: 2762188
MISDNVKKGVIRTPNRALLKACGYTDEDMEKPFIGIVNSFTEVVPGHIHLRTLSEAAKHGVYANGGTPFEFNTIGICDGIAMGHEGMKYSLPSREIIADAVESMARAHGFDGLVLIPTCDKIVPGMIMGALRLNIPFIVVTGGPMLPGEFQGKKYELISLFEGVGEYQVGKITEEELKCIEDCACSGAGSCAGLYTANSMACLTEALGLSLPMCATTHAVDAQKVRLAKKSGSKIVDMVKEDLKPTDILTKEAFENAILVDLALGGSTNTTLHIPAIANEIENKFITLDDFDRLSDEVPHIASIKPGGEHYMIDLHNAGGIPAVLNVLKEKIRDTKTVDGRSILEIAESVKYINYDVIRKVEAPVHETAGLRVLKGNLAPNGCVVKIGAVHPKMYKHDGPAKVYNSEDEAISAILGGKIVEGDVIVIRYEGPSGGPGMREMLSPTSAICGMGLDDSVALITDGRFSGGSRGPCIGHVSPEAAAGGVIAAIENGDIIKIDMIEKEINVDLDESVIKERLSKLGEFEPKIKKGYLSRYSKLVSSADEGAVLK

SEQ ID NO: 180 - protein, 613 aa, Pseudomonas putida
  PEPTIDE (1)..(613): IlvD proteinID: B0KN82.1; GeneID: 5872993
MPDYRSKTSTQGRNMAGARALWRATGMKDEDFKKPIIAIANSFTQFVPGHVHLKDLGQLVAREIERAGGVAKEFNTIAVDDGIAMGHDGMLYSLPSREIIADAVEYMVNAHCADAIVCISNCDKITPGMLMAALRLNIPVIFVSGGPMEAGKTKLASHGLDLVDAMVIAADSSASDEKVAEYERSACPTCGSCSGMFTANSMNCLTEALGLALPGNGSTLATHADREQLFLTAGRTIVELCKRYYGENDESVLPRSIANFKAFENAMMLDIAMGGSTNTILHLLAAAQEGEVEFDLRDIDRLSRKVPQLCKVAPNIQKYHMEDVHRAGGIFSILGSLARGGLLHTDLPTVHSRSMEEAIAKWDITQTDDEAVHTFFKAGPAGIPTQTAFSQSTRWETLDDDRENGCIRSFEHAYSQEGGLAVLYGNIALDGCVVKTAGVDESIHVFEGNAKIFESQDSAVRGILADEVKAGDIVIIRYEGPKGGPGMQEMLYPTSYLKSKGLGKACALLTDGRFSGGTSGLSIGHASPEAAAGGAIGLVRDGDKVLIDIPNRSINLLVSDEELAERRVEQDKKGWKPAEVRPRKVTTALKAYALLATSADKGAVRNKAMLEGL

SEQ ID NO: 181 - protein, 619 aa, Synechococcus elongatus
  PEPTIDE (1)..(619): IlvD proteinID:Q5N3N2.1; GeneID: 3199700
MPQYRSRTTTYGRNMAGARALWRATGMKDEDFEKPIIAVANSFTQFVPGHVHLKDLGQLVAREIERAGGVAKEFNTIAVDDGIAMGHGGMLYSLPSRDLIADSVEYMVNAHCADALVCISNCDKITPGMLMAALRLNIPAVFVSGGPMEAGKVILNGEERHLDLVDAMVVAADDRESDEDVATIERSACPTCGSCSGMFTANSMNCLTEALGLSLPGNGSLLATHGDRKELFLEAGRLAVKLAKQYYEQDDESVLPRSIASFKAFENAICLDIAMGGSTNTVLHLLAAAHEAGVDFTMKDIDRLSRKIPNLCKVAPSTQKYHMEDVHRAGGVIAILGELDRAGLLHREVPTVHSPSLGAALDQWDINRETATEEAKSRYLAAPGGVPTQEAFSQSKRWTALDLDRENGCIRDIEHAYSQDGGLAVLYGNLAEQGCIVKTAGVDENILVFSGPAVVCESQDEAVNWILNGRVKEGDVVLIRYEGPRGGPGMQEMLYPTSYLKSKGLGKACALITDGRFSGGTSGLSIGHVSPEAAEGGLIALVEQGDRIEIDIPNRRIHLAVSEEELAHRRAAMEARGDQAWTPKDRDRPISQALQAYAAMTTSAARGGVRDLSQILGSR

SEQ ID NO: 182 - protein, 554 aa, Thermotoga maritima; identical to SEQ ID NO: 118
  PEPTIDE (1)..(554): IlvD proteinID:NP_228361.1; GeneID: 897608

SEQ ID NO: 183 - protein, 562 aa, Escherichia coli
  PEPTIDE (1)..(562): IlvB proteinID:    NP_418127.11; GeneID:    948182
MASSGTTSTRKRFTGAEFIVHFLEQQGIKIVTGIPGGSILPVYDALSQSTQIRHILARHEQGAGFIAQGMARTDGKPAVCMACSGPGATNLVTAIADARLDSIPLICITGQVPASMIGTDAFQEVDTYGISIPITKHNYLVRHIEELPQVMSDAFRIAQSGRPGPVWIDIPKDVQTAVFEIETQPAMAEKAAAPAFSEESIRDAAAMINAAKRPVLYLGGGVINAPARVRELAEKAQLPTTMTLMALGMLPKAHPLSLGMLGMHGVRSTNYILQEADLLIVLGARFDDRAIGKTEQFCPNAKIIHVDIDRAELGKIKQPHVAIQADVDDVLAQLIPLVEAQPRAEWHQLVADLQREFPCPIPKACDPLSHYGLINAVAACVDDNAIITTDVGQHQMWTAQAYPLNRPRQWLTSGGLGTMGFGLPAAIGAALANPDRKVLCFSGDGSLMMNIQEMATASENQLDVKIILMNNEALGLVHQQQSLFYEQGVFAATYPGKINFMQIAAGFGLETCDLNNEADPQASLQEIINRPGPALIHVRIDAEEKVYPMVPPGAANTEMVGE

SEQ ID NO: 184 - protein, 96 aa, Escherichia coli
  PEPTIDE (1)..(96): IlvN proteinID:    NP_312638.1; GeneID:    915423
MQNTTHDNVILELTVRNHPGVMTHVCGLFARRAFNVEGILCLPIQDSDKSHIWLLVNDDQRLEQMISQIDKLEDVVKVQRNQSDPTMFNKIAVFFQ

SEQ ID NO: 185 - protein, 491 aa, Escherichia coli
  PEPTIDE (1)..(491): IlvC proteinID:    AAN83128; GeneID:   1035997
MANYFNTLNLRQQLAQLGKCRFMGRDEFADGASYLQGKKVVIVGCGAQGLNQGLNMRDSGLDISYALRKEAIAEKRASWRKATENGFKVGTYEELIPQADLVINLTPDKQHSDVVRTVQPLMKDGAALGYSHGFNIVEVGEQIRKDITVVMVAPKCPGTEVREEYKRGFGVPTLIAVHPENDPKGEGMAIAKAWAAATGGHRAGVLESSFVAEVKSDLMGEQTILCGMLQAGSLLCFDKLVEEGTDPAYAEKLIQFGWETITEALKQGGITLMMDRLSNPAKLRAYALSEQLKEIMAPLFQKHMDDIISGEFSSGMMADWANDDKKLLTWREETGKTAFETAPQYEGKIGEQEYFDKGVLMIAMVKAGVELAFETMVDSGIIEESAYYESLHELPLIANTIARKRLYEMNVVISDTAEYGNYLFSYACVPLLKPFMAELQPGDLGKAIPEGAVDNGQLRDVNEAIRSHAIEQVGKKLRGYMTDMKRIAVAG

SEQ ID NO: 186 - protein, 309 aa, Escherichia coli
  PEPTIDE (1)..(309): IlvE proteinID:    AHA68037; GeneID:  17726719
MTTKKADYIWFNGEMVRWEDAKVHVMSHALHYGTSVFEGIRCYDSHKGPVVFRHREHMQRLHDSAKIYRFPVSQSIDELMEACRDVIRKNNLTSAYIRPLIFVGDVGMGVNPPAGYSTDVIIAAFPWGAYLGAEALEQGIDAMVSSWNRAAPNTIPTAAKAGGNYLSSLLVGSEARRHGYQEGIALDVNGYISEGAGENLFEVKDGVLFTPPFTSSALPGITRDAIIKLAKELGIEVREQVLSRESLYLADEVFMSGTAAEITPVRSVDGIQVGEGRCGPVTKRIQQAFFGLFTGETEDKWGWLDQVNQ

SEQ ID NO: 187 - protein, 96 aa, Escherichia coli
  PEPTIDE (1)..(96): IlvNbis protein; proteinID:   NP_312638.1 ; GeneID: 915423
MQNTTHDNVILELTVRNHPDDFTHVCGLFARRAFNVEGILCLPIQDSDKSHIWLLVNDDQRLEQMISQIDKLEDVVKVQRNQSDPTMFNKIAVFFQ

SEQ ID NO: 188 - protein, 245 aa, Escherichia coli
  PEPTIDE (1)..(245): YgaZ proteinID:    NP_417167.1; GeneID:  945093
MESPTPQPAPGSATFMEGCKDSLPIVISYIPVAFAFGLNATRLGFSPLESVFFSCIIYAGASQFVITAMLAAGSSLWIAALTVMAMDVRHVLYGPSLRSRIIQRLQKSKTALWAFGLTDEVFAAATAKLVRNNRRWSENWMIGIAFSSWSSWVFGTVIGAFSGSGLLQGYPAVEAALGFMLPALFMSFLLASFQRKQSLCVTAALVGALAGVTLFSIPVAILAGIVCGCLTALIQAFWQGAPDEL

SEQ ID NO: 189 - protein, 111 aa, Escherichia coli
  PEPTIDE (1)..(111): YgaH proteinID:    NP_417168.1; GeneID:  945111
MSYEVLLLGLLVGVANYCFRYLPLRLRVGNARPTKRGAVGILLDTIGIASICALLVVSTAPEVMHDTRRFVPTLVGFAVLGASFYKTRSIIIPTLLSALAYGLAWKVMAII

SEQ ID NO: 190 - protein, 164 aa, Escherichia coli
  PEPTIDE (1)..(164): LrP protein; proteinID:   WP_000228473 ; GeneID:  32442276
MVDSKKRPGKDLDRIDRNILNELQKDGRISNVELSKRVGLSPTPCLERVRRLERQGFIQGYTALLNPHYLDASLLVFVEITLNRGAPDVFEQFNTAVQKLEEIQECHLVSGDFDYLLKTRVPDMSAYRKLLGETLLRLPGVNDTRTYVVMEEVKQSNRLVIKTR

SEQ ID NO: 191 - DNA, 1119 bp, Escherichia coli
  CDS (1)..(1119): IspG Gene encoding 4-hydroxy-3-methylbut-2-en-1-yl diphosphate synthase
atgcataaccaggctccaattcaacgtagaaaatcaacacgtatttacgttgggaatgtgccgattggcgatggtgctcccatcgccgtacagtccatgaccaatacgcgtacgacagacgtcgaagcaacggtcaatcaaatcaaggcgctggaacgcgttggcgctgatatcgtccgtgtatccgtaccgacgatggacgcggcagaagcgttcaaactcatcaaacagcaggttaacgtgccgctggtggctgacatccacttcgactatcgcattgcgctgaaagtagcggaatacggcgtcgattgtctgcgtattaaccctggcaatatcggtaatgaagagcgtattcgcatggtggttgactgtgcgcgcgataaaaacattccgatccgtattggcgttaacgccggatcgctggaaaaagatctgcaagaaaagtatggcgaaccgacgccgcaggcgttgctggaatctgccatgcgtcatgttgatcatctcgatcgcctgaacttcgatcagttcaaagtcagcgtgaaagcgtctgacgtcttcctcgctgttgagtcttatcgtttgctggcaaaacagatcgatcagccgttgcatctggggatcaccgaagccggtggtgcgcgcagcggggcagtaaaatccgccattggtttaggtctgctgctgtctgaaggcatcggcgacacgctgcgcgtatcgctggcggccgatccggtcgaagagatcaaagtcggtttcgatattttgaaatcgctgcgtatccgttcgcgagggatcaacttcatcgcctgcccgacctgttcgcgtcaggaatttgatgttatcggtacggttaacgcgctggagcaacgcctggaagatatcatcactccgatggacgtttcgattatcggctgcgtggtgaatggcccaggtgaggcgctggtttctacactcggcgtcaccggcggcaacaagaaaagcggcctctatgaagatggcgtgcgcaaagaccgtctggacaacaacgatatgatcgaccagctggaagcacgcattcgtgcgaaagccagtcagctggacgaagcgcgtcgaattgacgttcagcaggttgaaaaataa

SEQ ID NO: 192 - protein, 372 aa, Escherichia coli
MHNQAPIQRRKSTRIYVGNVPIGDGAPIAVQSMTNTRTTDVEATVNQIKALERVGADIVRVSVPTMDAAEAFKLIKQQVNVPLVADIHFDYRIALKVAEYGVDCLRINPGNIGNEERIRMVVDCARDKNIPIRIGVNAGSLEKDLQEKYGEPTPQALLESAMRHVDHLDRLNFDQFKVSVKASDVFLAVESYRLLAKQIDQPLHLGITEAGGARSGAVKSAIGLGLLLSEGIGDTLRVSLAADPVEEIKVGFDILKSLRIRSRGINFIACPTCSRQEFDVIGTVNALEQRLEDIITPMDVSIIGCVVNGPGEALVSTLGVTGGNKKSGLYEDGVRKDRLDNNDMIDQLEARIRAKASQLDEARRIDVQQVEK

SEQ ID NO: 193 - protein, 413 aa, Acidobacterium capsulatum
  PEPTIDE (1)..(413): IspG protein; proteinID:   ACO33342 ; GeneID:  7700480
MQRRKTHTVKIGKVRVGSDAPVVVQSMTNTDTADVASTIQQVAALATAGSELVRVTVNNDEAAKAVPAIVEGLDKLGIDVPIVGDFHYNGHQLLKKYPECARALAKYRINPGNVSIGRKDDDNFRTMIECAVENQKPVRIGVNWGSLDQALLTRMMDENSKLSNPLPARDVMMEAMCRSALDSAAAAEQYGLRSDQIIISGKVSGVLDLIDVYQMLAARCEYPLHLGLTEAGMGMKGIVASTAGLAPLLLQGIGDTIRVSLTPKPGGDRTEEVLTAQQILQSLGIRSFTPQVTACPGCGRTTSTFFQELAQQIQDYLRESMPVWRAQYPGVEELKLAVMGCVVNGPGESKHANIGISLPGTFEEPKAPVYVDGRLLTTLRGDTIVSDFQKILDDYVKNRYGSSQSEAELVEVH

SEQ ID NO: 194 - protein, 357 aa, Aquifex aeolicus
  PEPTIDE (1)..(357): IspG protein; proteinID:   NP_214061.1 ; GeneID:  1193119
MIQKRKTRQIRVGNVKIGGDAPIVVQSMTSTKTHDVEATLNQIKRLYEAGCEIVRVAVPHKEDVEALEEIVKKSPMPVIADIHFAPSYAFLSMEKGVHGIRINPGNIGKEEIVREIVEEAKRRGVAVRIGVNSGSLEKDLLEKYGYPSAEALAESALRWSEKFEKWGFTNYKVSIKGSDVLQNVRANLIFAERTDVPLHIGITEAGMGTKGIIKSSVGIGILLYMGIGDTVRVSLTDDPVVEVETAYEILKSLGLRRRGVEIVACPTCGRIEVDLPKVVKEVQEKLSGVKTPLKVAVMGCVVNAIGEAREADIGLACGRGFAWLFKHGKPIKKVDESEMVDELLKEIQNMEKDGGTN

SEQ ID NO: 195 - protein, 741 aa, Arabidopsis thaliana
  PEPTIDE (1)..(741): IspG protein; proteinID:   NP_851233 ; GeneID:  836181
MATGVLPAPVSGIKIPDSKVGFGKSMNLVRICDVRSLRSARRRVSVIRNSNQGSDLAELQPASEGSPLLVPRQKYCESLHKTVRRKTRTVMVGNVALGSEHPIRIQTMTTSDTKDITGTVDEVMRIADKGADIVRITVQGKKEADACFEIKDKLVQLNYNIPLVADIHFAPTVALRVAECFDKIRVNPGNFADRRAQFETIDYTEDEYQKELQHIEQVFTPLVEKCKKYGRAMRIGTNHGSLSDRIMSYYGDSPRGMVESAFEFARICRKLDYHNFVFSMKASNPVIMVQAYRLLVAEMYVHGWDYPLHLGVTEAGEGEDGRMKSAIGIGTLLQDGLGDTIRVSLTEPPEEEIDPCRRLANLGTKAAKLQQGVAPFEEKHRHYFDFQRRTGDLPVQKEGEEVDYRNVLHRDGSVLMSISLDQLKAPELLYRSLATKLVVGMPFKDLATVDSILLRELPPVDDQVARLALKRLIDVSMGVIAPLSEQLTKPLPNAMVLVNLKELSGGAYKLLPEGTRLVVSLRGDEPYEELEILKNIDATMILHDVPFTEDKVSRVHAARRLFEFLSENSVNFPVIHHINFPTGIHRDELVIHAGTYAGGLLVDGLGDGVMLEAPDQDFDFLRNTSFNLLQGCRMRNTKTEYVSCPSCGRTLFDLQEISAEIREKTSHLPGVSIAIMGCIVNGPGEMADADFGYVGGSPGKIDLYVGKTVVKRGIAMTEATDALIGLIKEHGRWVDPPVADE

SEQ ID NO: 196 - protein, 377 aa, Bacillus subtilis
  PEPTIDE (1)..(377): IspG protein; proteinID:   NP_390386.1 ; GeneID:  937984
MQVSEITHRTKTRPVKVGPLTIGGNNEVVIQSMTTTKTHDVEATVAEINRLAEAGCQIVRVACPDERAANAIADIKKRISIPLVVDIHFDYKLALKAIEGGADKIRINPGNIGRREKVEAVVKAAKDKGIPIRIGVNAGSLEKRILEKYGYPTADGMVESALHHIKILEDLDFHDIIVSMKASDVNLAIEAYEKAAKAFDYPLHLGITESGTLFAGTVKSAAGLGAILSKGIGNTMRISLSADPVEEVKVARELLKSFGLASNAATLISCPTCGRIEIDLISIANEVEEYISKIKAPIKVAVLGCAVNGPGEAREADIGIAGARGEGLLFRKGKIVRKVPEETMVEELKKEIDILAEEHYAKLEAEKAKLKEETQKA

SEQ ID NO: 197 - protein, 349 aa, Clostridium acetobutylicum
  PEPTIDE (1)..(349): IspG protein; proteinID:  NP_348422.1; GeneID:  1117980
MQRIETRKVKVGSVYVGGDSRVTVQSMTNTDTRDSKKTIEQIKKLEIAGCDIVRCAVPDFDAASSLSEITKNVKLPVVADIHFDYRLALEAIKNGVSALRINPGNIGSKERVELVAKSAKEKNIPIRIGVNSGSLEKDILNKYKRVCSEALVESALNHVKILEDVNFNDIVISIKSSNVQMMIDSYRLISKEVNYPLHLGVTEAGTIWRGTIKSSIGIGTLLSEGIGDTIRVSLTGDPVEEVKVGREILKTFGYLKSGVEFISCPTCGRTSIDLIKIANEVEKRLEKTNKSIKVAVMGCVVNGPGEAREADIGIAGGKGEGLIFKKGEIIKKVKEENLVDELMREIDNM

SEQ ID NO: 198 - protein, 378 aa, Corynebacterium glutamicum
  PEPTIDE (1)..(378): IspG protein; proteinID:  Q8NP12; GeneID:  1019970
MLAPRRKTRQLMVGKVGVGSDHPISVQSMTTTKTHDINGTLQQIAQLTATGCDIVRVACPKTVDAEALPIIAKKSPIPVIADIHFQPKYIFAAIDAGCAAVRVNPGNIKEFDGRVKEVAKAAGDAGIPIRIGVNGGSLDKRILDKYHGKATPEALVESAMWEAGLFEEHGFGDIAISVKHSDPVLMVEAYRQLAEQSDYPLHLGVTEAGPKFMGTIKSSVAFGALLSQGIGDTIRVSLSADPVEEIKVGDQILQSLNLRPRKLEIVSCPSCGRAQVDVYSLAEEVTEALDGMEVPLRVAVMGCVVNGPGEARDADLGVASGNGKGQIFVKGEVIKTVPESQIVETLIEEAMRIAEEMDPEVLAAASASGMKAEVKVTK

SEQ ID NO: 199 - protein, 429 aa, Deinococcus radiodurans
  PEPTIDE (1)..(429): IspG protein; proteinID:  NP_294109.1; GeneID:  1799325
MSFDSLPALPLDPLPDAALPTAPRRRQTVSVNVGGVMVGSAHPIVVQSMTNTDTANAEATAIQVAQLARAGSEIVRVTVNTREAAAAVPELVQRLADIGVHVPIVGDFHYNGHLLLREYPETARLLAKYRINPGNVGAGQRHDENFATMIEVAKEFDKPVRIGVNWGSLDQQVLARLMDENAAAGHPKSPTDVTIDAMIVSALDSARFAEELGLGHDKILISVKVSSAPELWQVYRQLAPLCDYPLHLGLTEAGMGMKGIVASSVALAPLLTEGIGDTIRVSLTPEPGAPRKLEVEVAQQILQSLGLRQFLPQVTSCPGCGRTTSSFFQTLAQKIQDFIRESMPEWKAKYPGVEDMQVAVMGCVVNGPGESKHANIGISLPGTGEDPRAPVYQDGKLLTTLKGPRIAEEFQELLEKYVEERYGQGVAQG

SEQ ID NO: 200 - protein, 369 aa, Pseudomonas putida
  PEPTIDE (1)..(369): IspG protein; proteinID:  NP_743014.1; GeneID:  1044720
MHGESPIKRRESRKIWVGNVPVGGDAPIAVQSMTNTDTNDVAATVAQIQRLVDAGVDIVRVSVPDMDAAEAFGKIKQRVSVPLVADIHFDYKIALRVAELGVDCLRINPGNIGREDRVRAVVDAARDRGIPIRIGVNAGSLEKDLQKKYGEPTPAALVESALRHVEHLDRLDFQDFKVSVKASDVFMAVEAYRLLAKQIVQPLHLGITEAGGLRSGTVKSAVGLGMLLAEGIGDTIRISLAADPVEEVKVGYDILKSLHLRSRGINFIACPSCSRQNFDVVKTMNELEGRLEDLLVPLDVAVIGCVVNGPGEAKEAHVGLTGGTPNLIYIDGKPAQKLTNDNLVDELEKLIRQKAAEKAEADAALIARG

SEQ ID NO: 201 - protein, 407 aa, Synechococcus elongatus
  PEPTIDE (1)..(407): IspG protein; proteinID:  Q5N3W3.1; GeneID:  3199581
MQTLSTPSTTATEFDTVIHRRPTRSVRVGDIWIGSRHPVVVQSMINEDTLDIDGSVAAIRRLHEIGCEIVRVTVPSLGHAKAVGDIKKKLQDTYRDVPLVADVHHNGMKIALEVAKHVDKVRINPGLYVFEKPDPNRQGYTPEEFERIGKQIRDTLEPLVTSLREQDKAMRIGVNHGSLAERMLFTYGDTPEGMVESALEFLRLCEEMDFRNLVISMKASRAPVMMAAYRLMAKRMDDLGMDYPLHLGVTEAGDGDYGRIKSTVGIGTLLAEGIGDTIRVSLTEAPENEIPVCYSILQALGLRKTMVEYVACPSCGRTLFNLEEVLHKVRAATNHLVGLDIAVMGCIVNGPGEMADADYGYVGKTPGTIALYRGRDEIKRVPEEQGVEELINLIKADGRWVEPEPIA

SEQ ID NO: 202 - DNA, 951 bp, Escherichia coli
  CDS (1)..(951): ispH Gene encoding 4-hydroxy-3-methylbut-2-enyl diphosphate reductase
atgcagatcctgttggccaacccgcgtggtttttgtgccggggtagaccgcgctatcagcattgttgaaaacgcgctggccatttacggcgcaccgatatatgtccgtcacgaagtggtacataaccgctatgtggtcgatagcttgcgtgagcgtggggctatctttattgagcagattagcgaagtaccggacggcgcgatcctgattttctccgcacacggtgtttctcaggcggtacgtaacgaagcaaaaagtcgcgatttgacggtgtttgatgccacctgtccgctggtgaccaaagtgcatatggaagtcgcccgcgccagtcgccgtggcgaagaatctattctcatcggtcacgccgggcacccggaagtggaagggacaatgggccagtacagtaacccggaagggggaatgtatctggtcgaatcgccggacgatgtgtggaaactgacggtcaaaaacgaagagaagctctcctttatgacccagaccacgctgtcggtggatgacacgtctgatgtgatcgacgcgctgcgtaaacgcttcccgaaaattgtcggtccgcgcaaagatgacatctgctacgccacgactaaccgtcaggaagcggtacgcgccctggcagaacaggcggaagttgtgttggtggtcggttcgaaaaactcctccaactccaaccgtctggcggagctggcccagcgtatgggcaaacgcgcgtttttgattgacgatgcgaaagacatccaggaagagtgggtgaaagaggttaaatgcgtcggcgtgactgcgggcgcatcggctccggatattctggtgcagaatgtggtggcacgtttgcagcagctgggcggtggtgaagccattccgctggaaggccgtgaagaaaacattgttttcgaagtgccgaaagagctgcgtgtcgatattcgtgaagtcgattaa

SEQ ID NO: 203 - protein, 316 aa, Escherichia coli
MQILLANPRGFCAGVDRAISIVENALAIYGAPIYVRHEVVHNRYVVDSLRERGAIFIEQISEVPDGAILIFSAHGVSQAVRNEAKSRDLTVFDATCPLVTKVHMEVARASRRGEESILIGHAGHPEVEGTMGQYSNPEGGMYLVESPDDVWKLTVKNEEKLSFMTQTTLSVDDTSDVIDALRKRFPKIVGPRKDDICYATTNRQEAVRALAEQAEVVLVVGSKNSSNSNRLAELAQRMGKRAFLIDDAKDIQEEWVKEVKCVGVTAGASAPDILVQNVVARLQQLGGGEAIPLEGREENIVFEVPKELRVDIREVD

SEQ ID NO: 204 - protein, 338 aa, Acidobacterium capsulatum?
  PEPTIDE (1)..(338): IspH protein; proteinID:  ACO32491.1; GeneID:  ACO32491.1
MTTITDQPTPAHVSAPDGERKVLLLKPRGFCAGVVRAVDIVRIALETFGAPIYVRKEIVHNRFVVNELAEKGAIFVEDIDQVPEGSRVIYSAHGVSPAVRQQSKDRNLRVIDATCPLVTKVHVEAVKFARQGYSLVLIGHRDHEEIEGTLGEAPDVTTVVSSAAEVAALEVPDPNRVAYLTQTTLSLDEARDMIEALKKKFPNIVGPHSQDICYATENRQVAVKNVAHQADLVLVVGSNNSSNSNRLVEVSRNLGTKGYLIDNSKAIRPEWLEGVATVAVTAGASAPEVLVEDVVKYLGSKGFGSVEEVEVMPENVRFGLPPEIVQAIQAAPSSPVSA

SEQ ID NO: 205 - protein, 289 aa, Aquifex aeolicus
  PEPTIDE (1)..(289): IspH protein; proteinID:  NP_214191.1; GeneID:  1193340
MVDIIIAEHAGFCFGVKRAVKLAEESLKESQGKVYTLGPIIHNPQEVNRLKNLGVFPSQGEEFKEGDTVIIRSHGIPPEKEEALRKKGLKVIDATCPYVKAVHEAVCQLTREGYFVVLVGEKNHPEVIGTLGYLRACNGKGIVVETLEDIGEALKHERVGIVAQTTQNEEFFKEVVGEIALWVKEVKVINTICNATSLRQESVKKLAPEVDVMIIIGGKNSGNTRRLYYISKELNPNTYHIETAEELQPEWFRGVKRVGISAGASTPDWIIEQVKSRIQEICEGQLVSS

SEQ ID NO: 206 - protein, 466 aa, Arabidopsis thaliana
  PEPTIDE (1)..(466): IspH protein; proteinID: NP_567965; GeneID: 829585
MAVALQFSRLCVRPDTFVRENHLSGSGSLRRRKALSVRCSSGDENAPSPSVVMDSDFDAKVFRKNLTRSDNYNRKGFGHKEETLKLMNREYTSDILETLKTNGYTYSWGDVTVKLAKAYGFCWGVERAVQIAYEARKQFPEERLWITNEIIHNPTVNKRLEDMDVKIIPVEDSKKQFDVVEKDDVVILPAFGAGVDEMYVLNDKKVQIVDTTCPWVTKVWNTVEKHKKGEYTSVIHGKYNHEETIATASFAGKYIIVKNMKEANYVCDYILGGQYDGSSSTKEEFMEKFKYAISKGFDPDNDLVKVGIANQTTMLKGETEEIGRLLETTMMRKYGVENVSGHFISFNTICDATQERQDAIYELVEEKIDLMLVVGGWNSSNTSHLQEISEARGIPSYWIDSEKRIGPGNKIAYKLHYGELVEKENFLPKGPITIGVTSGASTPDKVVEDALVKVFDIKREELLQLA

SEQ ID NO: 207 - protein, 314 aa, Bacillus subtilis
  PEPTIDE (1)..(314): IspH protein; proteinID:NP_390395.2; GeneID: 937900
MDVIKISPRGYCYGVVDAMVIAKNASLDKSLPRPIYILGMIVHNKHVTDAFEEEGIFTLDGSNRLDILKQVDKGTVIFTAHGVSPEVRRIAEEKGLVAIDATCPDVTKTHNLILEMKEKGYHVIYIGKKGHPEPEGAVGVAPEIVHLVETEEDVKNLDIQSEKLIVTNQTTMSQWDVHDIMELVKEKYPHVEYHQEICLATQVRQEAVSEQAKKADLTIVVGDPKSNNSNRLAQVSEEIAGTKAYRIGDLSELKLEWLKGVNTVAVTAGASTPTPITKEVIRFLEQFDHEDPSTWTTEHNIPLKKILPKVKAKN

SEQ ID NO: 208 - protein, 642 aa, Clostridium acetobutylicum
  PEPTIDE (1)..(642): IspH protein; proteinID:    NP_348471.12; GeneID:  1118030
MRKVMLAEKAGFCFGVKRAVDMALLTQKEYNKKIYTLGELIHNNDVVDKLKDNNVYPIGIEDIDNLKENDVILIRSHGISEEIYKILLSKGLTVINATCPFVTKIQEKVKKYNELGYDIVIVGDKYHPEVIGINGWCDNKAIISKQGENLENITSESKVCIVSQTTEKLENWEKVLKEVKNRAIEVISFNTICNATSERQKIAKDLSNKVDFMVVIGGKQSSNTTKLYEICKSNCNETIHVENSGEIPENILKNKNCVIGVTAGASTPDWIIEEAISKMSENQISNETNNEMADAMKFIAENEGKIYVGASVTGEIIQVSEKEVFLNINYKRDGVIPKSEIDDDGKDLKELFTVGDKIVAKIIKLKDADNYVVLSVKELQREQGYKEIKEAFENKTTLNVVVKEDVKGGIIASYKGIRIFIPASHVELFHVDNLKEYIGKSFDVAIIEYSTKKRQTKIVASRRALLSKEKEKVEETVWNKLEEGQVVEGEVKRLTDFGAFVEIEGVDGLLHVSEISWGRVEKPADVLKIGDKIKVYVLSVDKENKKLSLSVKKLTENPWNNVEEKYPVGSVVLGKVIRFADFGAFVKLEPGVDGLVHISEISHKRIAKPSDALNVGEEIKAKILEVSSEEKKIGLSIREVEE

SEQ ID NO: 209 - protein, 325 aa, Corynebacterium glutamicum
  PEPTIDE (1)..(325): IspH protein; proteinID:    WP_004568094; GeneID:  23503428
MSSPVISPETKTGKKILLAAPRGYCAGVDRAVETVERALEEYGAPIYVRKEIVHNRYVVDTLAEKGAIFVNEASEAPEGANMVFSAHGVSPMVHEEAAAKNIKAIDAACPLVTKVHKEVQRFDKQGFHILFIGHEGHEEVEGTMGHSVEKTHLVDGVAGIATLPEFLNDEPNLIWLSQTTLSVDETMEIVRELKVKFPQLQDPPSDDICYATQNRQVAVKAIAERCELMIVVGSRNSSNSVRLVEVAKQNGADNAYLVDYAREIDPAWFEGVETIGISSGASVPEILVQGVIERLAEFGYDDVEEVTSAAEKIVFALPRVLRHKN

SEQ ID NO: 210 - protein, 335 aa, Deinococcus radiodurans
  PEPTIDE (1)..(335): IspH protein; proteinID:    NP_295887.1; GeneID: 1798352
MIERIYLAKPRGFCAGVVMAIQAVEKAAVREDKPVTVYHSIVHNHTVVERLSEGGRVHFVEDLDAVDALPDSGDTVIFSAHGISPAVRERARSLGLSTIDATCPLVTKVHTEAKKYAREGYTILLIGDSAGHQEVIGTRGEAPENTILVGVLGKTGPGLNDPHAVQVPDPERLVVLTQTTLSVDDTRKTVDILKARFPALVVPPSEDLCYATKNRQDAVKNIAPNVDAFLVLTSTHSSNGMRLLELAEAECGRAYRLETAADLTRLEQNGDLGGVRSVGITSAASTPDDLVQDVVAHFRALNPALEVIEEGEWENIEFREPKKIAPTQELPRTMQ

SEQ ID NO: 211 - protein, 315 aa, Pseudomonas putida
  PEPTIDE (1)..(315): IspH protein; proteinID:    NP_742768.1; GeneID: 1044422
MQIKLANPRGFCAGVDRAIEIVNRALEVFGPPIYVRHEVVHNKFVVEDLRNRGAIFVEELDQVPDDVIVIFSAHGVSQAVRQEAAGRGLKVFDATCPLVTKVHIEVAKYSRDGRECILIGHEGHPEVEGTMGQYDASNGGAIYLVEDEEDVANLQVRDPDHLAFVTQTTLSMDDTSRVIDALRARFPNIGGPRKDDICYATQNRQDAVKQLAGESDVVLVVGSPNSSNSNRLRELAERMGTPAYLIDGAEDLQRGWFDQAARIGITAGASAPEVLVRGVIEQLKAWGATGAEELDGREENITFSMPKELRVRSLI

SEQ ID NO: 212 - protein, 398 aa, Synechococcus elongatus
  PEPTIDE (1)..(398): IspH protein; proteinID:    Q5N249.1; GeneID: 3200144
MDTKAFKRALHQSDRYNRKGFGKTTDVSGALESAYQSDLIQSLRQNGYRLQRGEITIRLAEAFGFCWGVERAVAIAYETRQHFPQERIWITNEIIHNPSVNQHLREMSVEFIPCERGEKDFSVVDRGDVVILPAFGASVQEMQLLDEKGCHIVDTTCPWVSKVWNTVEKHKRGAHTSIIHGKYNHEETVATSSFAETYLVVLNLEQAQYVCDYILNGGDRDEFMTRFGKACSAGFDPDRDLERIGIANQTTMLKSETEAIGKLFERTLLKKYGPQALNDHFLAFNTICDATQERQDAMFQLVEEPLDLIVVIGGFNSSNTTHLQEIAIERQIPSFHIDAAERIGPGNRIEHKPLHTDLTTTEPWLPAGPLTIGITSGASTPDKVVEDVIERLFDLQRS

SEQ ID NO: 213 - protein, 275 aa, Thermotoga maritima
  PEPTIDE (1)..(275): IspH protein; proteinID:    NP_229243.1; GeneID: 898031
MKIVVAKNIGFCFGVERAIRTVEELLDEGKKVVTDGEIVHNKQVMEQLTKKGLKVSSEMTDGEVFVVRAHGIPKDRLEELKKIFPEVVDLTCPIVSQLFKTAQRYAKERKVIVFGKEDHPEMVALRGYAPAIVTKVPFKLEEKKVVFLSQTTSSLEEYKEFVAAMIRMNEFEEAVFLNTICPVTVNREREVEELSKICDLSIVVGGKHSSNTGKLFRIASKHSKTIWIESPDELPADVVKYGTVCVFSGTSTPNSLIENVVRKLKEMEGKRDGTI

SEQ ID NO: 214 - protein, 620 aa, Escherichia coli
  PEPTIDE (1)..(620): DXS protein; proteinID:  NP_414954.1; GeneID: 945060
MSFDIAKYPTLALVDSTQELRLLPKESLPKLCDELRRYLLDSVSRSSGHFASGLGTVELTVALHYVYNTPFDQLIWDVGHQAYPHKILTGRRDKIGTIRQKGGLHPFPWRGESEYDVLSVGHSSTSISAGIGIAVAAEKEGKNRRTVCVIGDGAITAGMAFEAMNHAGDIRPDMLVILNDNEMSISENVGALNNHLAQLLSGKLYSSLREGGKKVFSGVPPIKELLKRTEEHIKGMVVPGTLFEELGFNYIGPVDGHDVLGLITTLKNMRDLKGPQFLHIMTKKGRGYEPAEKDPITFHAVPKFDPSSGCLPKSSGGLPSYSKIFGDWLCETAAKDNKLMAITPAMREGSGMVEFSRKFPDRYFDVAIAEQHAVTFAAGLAIGGYKPIVAIYSTFLQRAYDQVLHDVAIQKLPVLFAIDRAGIVGADGQTHQGAFDLSYLRCIPEMVIMTPSDENECRQMLYTGYHYNDGPSAVRYPRGNAVGVELTPLEKLPIGKGIVKRRGEKLAILNFGTLMPEAAKVAESLNATLVDMRFVKPLDEALILEMAASHEALVTVEENAIMGGAGSGVNEVLMAHRKPVPVLNIGLPDFFIPQGTQEEMRAELGLDAAGMEAKIKAWLA

SEQ ID NO: 215 - protein, 182 aa, Escherichia coli
  PEPTIDE (1)..(182): IPI protein; proteinID:  NP_417365.1; GeneID: 949020
MQTEHVILLNAQGVPTGTLEKYAAHTADTRLHLAFSSWLFNAKGQLLVTRRALSKKAWPGVWTNSVCGHPQLGESNEDAVIRRCRYELGVEITPPESIYPDFRYRATDPSGIVENEVCPVFAARTTSALQINDDEVMDYQWCDLADVLHGIDATPWAFSPWMVMQATNREARKRLSAFTQLK

SEQ ID NO: 216 - protein, 398 aa, Escherichia coli
  PEPTIDE (1)..(398): Isp(dxr) protein; proteinID:  NP_414715.1; GeneID: 945019
MKQLTILGSTGSIGCSTLDVVRHNPEHFRVVALVAGKNVTRMVEQCLEFSPRYAVMDDEASAKLLKTMLQQQGSRTEVLSGQQAACDMAALEDVDQVMAAIVGAAGLLPTLAAIRAGKTILLANKESLVTCGRLFMDAVKQSKAQLLPVDSEHNAIFQSLPQPIQHNLGYADLEQNGVVSILLTGSGGPFRETPLRDLATMTPDQACRHPNWSMGRKISVDSATMMNKGLEYIEARWLFNASASQMEVLIHPQSVIHSMVRYQDGSVLAQLGEPDMRTPIAHTMAWPNRVNSGVKPLDFCKLSALTFAAPDYDRYPCLKLAMEAFEQGQAATTALNAANEITVAAFLAQQIRFTDIAALNLSVLEKMDMREPQCVDDVLSVDANAREVARKEVMRLAS

SEQ ID NO: 217 - protein, 330 aa, Escherichia coli
  PEPTIDE (1)..(330): RpoS protein; proteinID:  NP_417221.1; GeneID: 947210
MSQNTLKVHDLNEDAEFDENGVEVFDEKALVEQEPSDNDLAEEELLSQGATQRVLDATQLYLGEIGYSPLLTAEEEVYFARRALRGDVASRRRMIESNLRLVVKIARRYGNRGLALLDLIEEGNLGLIRAVEKFDPERGFRFSTYATWWIRQTIERAIMNQTRTIRLPIHIVKELNVYLRTARELSHKLDHEPSAEEIAEQLDKPVDDVSRMLRLNERITSVDTPLGGDSEKALLDILADEKENGPEDTTQDDDMKQSIVKWLFELNAKQREVLARRFGLLGYEAATLEDVGREIGLTRERVRQIQVEGLRRLREILQTQGLNIEALFRE

SEQ ID NO: 218 - DNA, 4461 bp, Escherichia coli
  CDS (1)..(4461): GltB Gene encoding glutamate synthase [NADPH] large chain
atgttgtacgataaatcccttgagagggataactgtggtttcggcctgatcgcccacatagaaggcgaacctagccacaaggtagtgcgtactgcaatacacgcactggcccgcatgcagcaccgtggcgcgattctcgccgatggtaaaaccggcgacggttgcggcttgctgttacaaaaaccggatcgcttttttcgcatcgttgcgcaggagcgcggctggcgtttagcaaaaaactacgctgtcgggatgctcttcctgaataaagatcctgaactcgccgctgccgcacgccgcatcgttgaagaagaactgcaacgcgaaaccttgtcgattgtgggctggcgtgatgtccccactaacgaaggcgtgctgggtgaaatcgccctctcctctctgccacgcattgagcaaatttttgtgaacgccccggcaggctggcgtccacgcgatatggagcgccgtctgtttatcgcccgccgccgcattgaaaagcgtctcgaagccgacaaagacttctacgtctgtagcctgtcgaatctggtgaacatctataaaggtctgtgtatgccgacggatctgccgcgcttttatctggatcttgcggacctgcgtctggaatcggccatttgcctgttccaccagcgcttctccactaacaccgtaccgcgctggccgctggcgcaaccgttccgctatctggcgcataacggtgaaatcaacaccatcaccggtaaccgccaatgggcgcgtgcgcgtacttataaattccagacaccgcttatccctgacctgcacgacgccgcaccgttcgtcaacgaaaccggctctgactccagttcgatggataacatgctggaactgctgctggcaggcgggatggatatcatccgcgccatgcgtctattagtaccacccgcctggcagaacaacccggatatggacccggaactgcgtgccttctttgactttaactccatgcatatggagccgtgggatggcccggcgggcatcgtgatgtccgacggtcgttttgccgcctgtaacctcgaccgtaacggtctgcgtccggcgcgctacgtcatcaccaaagataagctcatcacctgcgcctctgaagtcggtatctgggattaccagcctgacgaagtggtcgaaaaaggccgcgtcgggccaggcgaactgatggttatcgacacccgcagtgggcgtattctgcactcggcagaaaccgatgacgatctgaaaagccgccatccatataaagagtggatggagaaaaacgtccgccgactggtaccgtttgaagatctgcccgatgaagaagtgggtagccgcgaactggacgacgacacgcttgccagctaccagaaacagtttaactacagcgcggaagagctggactccgtaattcgcgtactgggcgaaaacggtcaggaagcggtcggttcgatgggcgatgataccccattcgccgtgctctccagtcagccgcgcattatttacgactacttccgccagcagtttgcccaggtgactaacccgccaatcgacccgctgcgtgaagcgcatgttatgtcgctcgccaccagtatcggtcgtgaaatgaacgtcttttgcgaagcagagggccaggcgcaccgtttaagctttaaatcgccgattctgctctactccgatttcaaacagctcacgacgatgaaagaggagcactaccgcgcagatacgctggatatcacctttgacgtcactaaaaccacgctcgaagcgacagtcaaagagctgtgcgacaaagccgaaaaaatggtacgtagcggcaccgtgctgctggtgctctccgaccggaatatcgctaaagatcgcctgccggttccagccccgatggcggttggcgcgatccagacccgtctggtcgatcaaagcctgcgttgcgatgccaacatcatcgtcgaaaccgccagcgcccgcgatccgcaccacttcgccgtgttgctgggcttcggcgcgacggctatttatccataccttgcctatgaaacgctgggccgcctggtagacacccatgcgattgccaaagattatcgtaccgtgatgctcaactaccgtaacggcatcaacaaaggcttgtacaaaatcatgtccaaaatgggcatctccaccatcgcctcttaccgctgctcgaaactgtttgaagcggtcggtctacacgatgatgtagtgggcctgtgcttccagggggcggtcagccgcattggtggagcaagctttgaagacttccagcaggatctgctgaatctgtcgaaacgtgcctggctggcgcgtaagcccatcagccagggcggtctgctgaaatacgtccacggcggcgaataccacgcctacaacccggacgtggtgcgcacgctgcaacaagcggtacaaagcggcgagtacagcgactatcaggaatacgcgaagctggttaatgagcgtccggcaaccacgctgcgcgatctgctggcaattacgccgggtgaaaacgcggtcaacattgctgatgttgaaccggcaagcgaactgtttaaacgctttgataccgccgcgatgtctatcggcgcgttaagcccggaagcccacgaggcgctggcggaagcgatgaacagcatcggcggtaattcgaactccggtgaaggcggcgaagacccggcgcgctacggcaccaacaaagtgtcgcgcatcaagcaggtggcttccggtcgctttggggttactccggcgtatctggtcaatgccgacgtcattcagattaaagtcgcccagggcgcgaagccaggcgaaggcggtcagttgccgggtgataaagtcacgccttacatcgccaaactgcgctattcggtgcccggagtgacgctgatctccccgccgccgcaccacgatatctactctatcgaggacttagcgcagctcattttcgacctcaagcaggttaacccgaaagcgatgatctccgtgaagctggtttccgaaccgggagtaggcaccatcgcgactggcgtggcaaaagcttatgcggacttgatcaccatcgcaggctatgacggcggcaccggcgcaagtccgctttcatcggtgaaatacgcaggctgtccgtgggagctggggcttgttgaaacccagcaggcgctggttgctaacggcttgcgtcacaagatccgtttgcaggtcgatggcggcctgaaaacgggtgtcgatatcatcaaggcggcgattctcggcgcagaaagcttcggcttcggcactggcccgatggtggcgctcggctgtaaatatctacgtatttgccatctgaacaactgcgcaacgggtgtagcaactcaggatgacaaactgcgtaagaaccactatcacggcctgccattcaaggtgacgaattactttgagtttatcgcccgtgaaacccgcgagctgatggcacagcttggcgtaacacgtctggtggatctgattggtcgcaccgacctgctgaaagagctggacggtttcaccgccaaacagcagaagctggcgctgtcgaagctgctggagactgccgaaccgcatccaggtaaggcactctactgcaccgaaaacaacccgccgtttgataacggcctgctgaacgcgcagttgctgcaacaggcgaaaccgtttgtcgatgagcgccagagcaaaaccttctggttcgatattcgcaacaccgaccgttctgtcggcgcgtcgctttcaggctatatcgcccagacgcacggcgatcaggggctggcagccgatcctatcaaagcgtacttcaacggcaccgcaggccagagcttcggcgtgtggaacgcgggcggcgtggaactgtacctgaccggtgatgccaacgactatgtcggtaaaggcatggcgggcggcttaatcgccattcgtcctccggttggttccgccttccgcagccatgaagcaagcattatcggcaacacctgcctgtatggcgcgaccggtggtcgtctgtatgccgcaggccgcgcgggtgaacgtttcggcgtgcgtaactccggtgctatcaccgtggtagaaggcattggcgacaacggttgtgaatatatgacgggtggtatcgtctgcattctgggtaaaaccggcgttaacttcggtgcgggcatgaccggcggtttcgcttacgttctcgatgaaagcggcgatttccgcaaacgcgttaacccggaactggtcgaggtcttaagcgttgacgctctggcgatccatgaagagcatctgcgtggtcttatcaccgagcatgtgcagcataccggctctcagcgcggtgaagagattctggcgaactggtcaaccttcgccactaaatttgcgctggttaaaccgaagtccagtgatgtaaaagcactgctgggtcaccgtagtcgtagcgcagctgagttgcgcgtgcaggcgcagtaa

SEQ ID NO: 219 - protein, 1486 aa, Escherichia coli
MLYDKSLERDNCGFGLIAHIEGEPSHKVVRTAIHALARMQHRGAILADGKTGDGCGLLLQKPDRFFRIVAQERGWRLAKNYAVGMLFLNKDPELAAAARRIVEEELQRETLSIVGWRDVPTNEGVLGEIALSSLPRIEQIFVNAPAGWRPRDMERRLFIARRRIEKRLEADKDFYVCSLSNLVNIYKGLCMPTDLPRFYLDLADLRLESAICLFHQRFSTNTVPRWPLAQPFRYLAHNGEINTITGNRQWARARTYKFQTPLIPDLHDAAPFVNETGSDSSSMDNMLELLLAGGMDIIRAMRLLVPPAWQNNPDMDPELRAFFDFNSMHMEPWDGPAGIVMSDGRFAACNLDRNGLRPARYVITKDKLITCASEVGIWDYQPDEVVEKGRVGPGELMVIDTRSGRILHSAETDDDLKSRHPYKEWMEKNVRRLVPFEDLPDEEVGSRELDDDTLASYQKQFNYSAEELDSVIRVLGENGQEAVGSMGDDTPFAVLSSQPRIIYDYFRQQFAQVTNPPIDPLREAHVMSLATSIGREMNVFCEAEGQAHRLSFKSPILLYSDFKQLTTMKEEHYRADTLDITFDVTKTTLEATVKELCDKAEKMVRSGTVLLVLSDRNIAKDRLPVPAPMAVGAIQTRLVDQSLRCDANIIVETASARDPHHFAVLLGFGATAIYPYLAYETLGRLVDTHAIAKDYRTVMLNYRNGINKGLYKIMSKMGISTIASYRCSKLFEAVGLHDDVVGLCFQGAVSRIGGASFEDFQQDLLNLSKRAWLARKPISQGGLLKYVHGGEYHAYNPDVVRTLQQAVQSGEYSDYQEYAKLVNERPATTLRDLLAITPGENAVNIADVEPASELFKRFDTAAMSIGALSPEAHEALAEAMNSIGGNSNSGEGGEDPARYGTNKVSRIKQVASGRFGVTPAYLVNADVIQIKVAQGAKPGEGGQLPGDKVTPYIAKLRYSVPGVTLISPPPHHDIYSIEDLAQLIFDLKQVNPKAMISVKLVSEPGVGTIATGVAKAYADLITIAGYDGGTGASPLSSVKYAGCPWELGLVETQQALVANGLRHKIRLQVDGGLKTGVDIIKAAILGAESFGFGTGPMVALGCKYLRICHLNNCATGVATQDDKLRKNHYHGLPFKVTNYFEFIARETRELMAQLGVTRLVDLIGRTDLLKELDGFTAKQQKLALSKLLETAEPHPGKALYCTENNPPFDNGLLNAQLLQQAKPFVDERQSKTFWFDIRNTDRSVGASLSGYIAQTHGDQGLAADPIKAYFNGTAGQSFGVWNAGGVELYLTGDANDYVGKGMAGGLIAIRPPVGSAFRSHEASIIGNTCLYGATGGRLYAAGRAGERFGVRNSGAITVVEGIGDNGCEYMTGGIVCILGKTGVNFGAGMTGGFAYVLDESGDFRKRVNPELVEVLSVDALAIHEEHLRGLITEHVQHTGSQRGEEILANWSTFATKFALVKPKSSDVKALLGHRSRSAAELRVQAQ

SEQ ID NO: 220 - protein, 1481 aa, Pseudomonas putida
  PEPTIDE (1)..(1481): GltB protein; proteinID:  AEJ15448.1; GeneID: 10940531
MKTGLYHPEEFKDNCGFGLIAHMTGEPSHHLLQTAMQALTCMTHRGGINADGKTGDGCGLLMQKPDQFLRAVAQEHFAVELPKQYAVGMVFFNQDPVKAEAARANMDREILAAGLKLVGWRKVPIDTSVLGRLALERLPQIEQVFIGGEGLSDQEFAIKLFSARRRSSVANAHDADHYICSFSHKTIIYKGLMMPRDLAAFYPDLGDERLQTAICVFHQRFSTNTLPKWPLAQPFRFLAHNGEINTITGNRNWAMARRTKFANDLIPDLEELGPLVNRVGSDSSSMDNMLELMVTGGIDLFRGVRMLVPPAWQNVETMDADLRAFYEYNSMHMEPWDGPAGIVMTEGRHAVCLLDRNGLRPARWVTTKNGYITLASEIGVWDYKPEDVIAKGRVGPGQIFAVDTETGQILDTDAIDNRLKSRHPYKRWLRQHATRIQATLTDDQGVASYDADQLKQYMKMFQVTFEERDQVLRPLGEQGQEAVGSMGDDTPMAVLSQRVRSPYDFFRQQFAQVTNPPIDPLREAIVMSLEICLGAERNIFQESPEHASRVILSSPVISPAKWRSLMNLEREGFDRQLIDLNYEESVGLEAAIRNIADQAEEAVRAGKTQLVLSDRYIAPGKLPVHASLAVGAVHHRLTEQGLRCDSNILVETATARDPHHFAVLLGFGASAVYPYLAYEVLADLIRTGEVLGDLDEVFKYYRKGISKGLLKILSKMGISTIASYRGAQLFEAIGLSEEVVGLSFKGVSSRIKGARFADLESDQKLLAAEAWSARKPIQQGGLLKFVHGGEYHAYNPDVVNTLQAAVQQGDYAKFKEYTTLVDQRPVSMIRDLLKVKVADQPLPLEQIEPLEAILKRFDSAGISLGALSPEAHEALAEAMNRLGARSNSGEGGEDPARYGTIKSSKIKQVATGRFGVTPEYLVNAEVLQIKVAQGAKPGEGGQLPGGKVNGLIAKLRYAVPGVTLISPPPHHDIYSIEDLAQLIYDLKQVNPQALVSVKLVAEAGVGTIAAGVAKAYADLITISGYDGGTGASPLTSIKYAGAPWELGLAETHQTLRGNDLRGKVRVQTDGGLKTGLDVIKAAILGAESFGFGTAPMIALGCKYLRICHLNNCATGVATQNDKLRKDHYIGTVDMVINFFTFVAEETREWLAKLGVRSLGELIGRTDLLDVLPGDTERQQYLDLTPLLGSSHIPADKPQFCEVDKNPPFDQGELAEKMVEMAMPAIRDQAGGEFSLDICNCDRSIGARVSGEIARLHGNQGMAAAPITFRFKGTAGQSFGVWNAGGLNLHLEGDANDYVGKGMTGGKVTIVPPAGSPFETQHSAIVGNTCLYGATGGKLFAAGTAGERFAVRNSGAHAVVEGTGDHCCEYMTGGFVCVLGKTGYNFGSGMTGGFAYVLDMDNTFVDKLNHELVEIQRISGEAMEAYRSHLARVLAEYVEETGSEWGRELSENLDDYVRRFWLVKPKAANLKQLLSSTRANPQ

SEQ ID NO: 221 - protein, 1597 aa, Deinococcus swuensis
  PEPTIDE (1)..(1597): GltB protein; proteinID:  NP_293907.1; GeneID: 1800334
MQTPPQGVPPSRPPSRGEIEAARQHGLYVGREHDACGVGFVAHIKGLKQHSIITQGLKILENLDHRGAVGADPLMGDGAGLLIQIPDAFYRAQMALQDVTLPPAGDYGVGMIFLPKEIASRRACEQELERAVRAEGQLVLGWRDVPVNREMPMSPTVREKEPVIRQIFIGAGPDTLVPDALERKLYVIRRRASNAIRALNFTHGAEYYVPSMSCRTVIYKGLLLATQVGEYYLDLQDTAVVSALALVHQRFSTNTFPEWQLAHPYRMVAHNGEINTVKGNFNWMRAREGVMSSPVLGDDLKKIYPVSFEGESDTATFDNALELLTLAGYPMAHAAMMMIPEAWEDNPLIDDRRRAFYEYHAALMEPWDGPAAMVFTDGRQVGAMLDRNGLRPARYIQTRDDLVILASESGVLPIPESRIVKKWRLQPGKMFMVDLEAGRIVEDAELKNQYASAKPYRQWVDNTRVPLADAEELGTVGTFTESLLDRQQAFGYSQEDLKFLMGPMAKSGEEGLGSMGNDSPLAVLSARSKPLYSYFRQLFAQVTNPPIDPIRESVVMSLRSFVGPRPNLLDINAVNPQMRLEVSQPILDFDDMARVRSISEHTRGKFSAYELDITYPAEWGARGIEAKLATINAWAVDAIEGGHNIIIISDRRVDRERVAIPALLALSSVHHHLVKAGLRMKVGLVVETGDAREVHHFAALAGYGAEGIHPYLALETLIDLHTEIPGMPNLSDIGPAKAMRNYIKAIGKGLSKIMSKMGVSTYMSYCGAQLFEAMGLQTEFVEKYFRGTATQIGGIGIFEVAEEALRTHAAAFGADPVLARGLDAGGEYAWRVRGEEHMWTPDAIAKLQHATRSGSASTYEEYARIINDQSKRHMTLRGLFEFRTDGATPIPIEEVEPAAEIVKRFATGAMSLGSISTEAHTTLAVAMNRIGGKSNTGEGGEDPARYERELRGESIGEGETLAGILGASRVEVDYPLEPGDSLRSRIKQVASGRFGVTTGYLGSADQIQIKMAQGAKPGEGGQLPGGKVSEYIGYLRHSVPGVGLISPPPHHDIYSIEDLKQLIHDLKNVNPRADISVKLVSEVGVGTVAAGVAKCKADHIVIAGHDGGTGASPWSSIKHAGTPWEMGLAETQQTLVLNRLRDRVRVQTDGQLKTGRDVVVAALLGADEFGFATAPLVVQGCIMMRKCHLNTCPVGVATQDPVLRARFTGKPEHVINYFFFVAEEVRAIMASLGLRSFDELIGRSDLLDTRAGVAHWKAQGLDFSRLFFRADLPDVGHRHTGTQDHGLEGALDRVLIEKCRPAIEKGERVHFLQDVRNVNRSVGAMLSGELIRVRPEGLPDQTVFIQMEGTGGQSFGAFLAPGLTLYLIGDANDYAGKGLSGGRVVVRPSIEFRGDARQNIITGNTALYGATAGEAFLRGVAGERFAVRLSGARAVVEGTGDHGCEYMTGGTVVVLGQTGRNFAAGMSGGVAYVYDEDGSFEKKCNLSMVSLHRVQPADEQMQSADARSLHSGQADETQLRELIENHHRWTGSAIASDILDDWDNARKRFVKVFPLEYQRALNEQAARQPAPGTVEAADTTDMGVGLSRKGGQGTLTT

SEQ ID NO: 222 - protein, 503 aa, Methanoculleus chikugoensis
  PEPTIDE (1)..(503): GltB protein; proteinID:  WP_011844969; GeneID: 4847827
MTIGSLPSRYRIGIDTVRCMECGRCIENCSYGVFRLDGDRIFVNSRNCTACHRCIACCPRDAISLEEHPCDYRSHPLWTREAREAIYNQARTGKIILAGMGNALDYPVIFDRLVLDACQVTNPSLDPLREPIELVTHLGKRPARLDLRRREGGDVELSTRLTPNLRIETPVMIGHMSYGAISLNAQVAMARAAKKTGTFMGTGEGGLHAALHPYQDRMIVQVASGRFGVNIDYLERGAAIEIKIGQGAKPGIGGHLPGEKVCAEISRTRMIPEGSDAISPAPHHDIYSIEDLAQLVRGLKEATEWKKPVFVKIAAVHNAAAIAAGIARSPADAVVVDGFRGGTGAAPMVLRDHVGIPIEAAVASVDQKLRDQGIRNEISVIASGGIRGSADIAKAIALGADAVYIGTAALAAMGCRVCGNCYRGLCPWGIATQRPGLVARLDPDEASELVANLIRAWTLELAELLGAAGINSIESLRGNRDRLRGYMLDEGLMQVLDVRAVGA

SEQ ID NO: 223 - protein, 1536 aa, Acidobacterium sp.?
  PEPTIDE (1)..(1536): GltB protein; proteinID:  WP_041840353.1; GeneID: 7698069
MDDLSDQRGLYRSTDEHDACGVGFVAHIKGVRSHSIVRQALDLLVNLEHRGAAGADPDTGDGAGILVQMPDKFLRKTVNFLLPLAGAYGAGLIFMPTDHKVQSKLRALVHRIAVEEGLAVLGWRPVPTDLSKIGKSAAAVAPVFEQLFVCSADTGARTRGPVFERQLYIARKRIEHEVETLSLAPHHRKDFYLASLSANTVIYKGMLTATQIEGMFPDLSDPDFESALALVHQRFSTNTFPSWPLAHPYRYVAHNGEINTLRGNANWMKAREGLLKSSVFGDDLPKVLPVITPGGSDTATFDNVLEFLVMAGRTLPHAVLMMIPESWSGNPAMAPAVRAFYEYHASLMEPWDGPASITFTDGTLIGAVLDRNGLRPSRYCITKDDLVIMASEVGVLDIPADNIVRKDRLRPGKMLLIDTGQGRIISDEEIKRTLAAEQPYGEWLQQNFVDIEDLPPAAAERPDHQTVFRRQQAFGYTQEDLRVLMTPMAQHGEEPIGSMGSDTALAVLSDQPRLLYDYFTQLFAQVTNPPLDAIREELVTSMGASIGPEGNLLEAGPENCRQIKVDFPVLHNDQVAKLRHLPPGSRFRSTTLPLLYNPDDDGPGLERAMAELCRKASAAVAAGYGILILSDRGVDAKHAPIPSLLATAGVHHHLVREGTRTKCGLLIESGDAREVHHVALLLGYGAGSVNPYLAFETLDDLIRQGSLPTVTHSQAVTKYIKALNKGVLKVMSKMGISTLQSYRGAQIFEAIGLDREFVEKYFTSTASRIGGIGVKEISEEVRQRHARAFDSNASAALVNGGEYQWRRDGEVHLFNPDTVFKLQHATRSGQYHIFKDYTRLVNDQSRQRATLRSLFAIKPFGPPVPLDEVEPLEKILPRFSTGAMSYGSISGEAHETLAIAMNRMGAKSNTGEGGEDPARYVPDPNGDSRRSAIKQVASGRFGVTSEYLVSADDIQIKMAQGAKPGEGGQLPGHKVYPWIAKVRHSTPGVGLISPPPHHDIYSIEDLAQLIFDLKNANPVARIHVKLVAESGVGTVAAGVSKAHADVVLISGHDGGTGASPLTSLKHAGVPWELGLAETQQVLLMNRLRDRIVVQVDGQMKTGRDVVVAALLGAEEFGFATAPLVVMGCVMMRVCHLNTCPVGIATQDPELRQTFSGKPEFVENFFHFISQEVRELMAELGFRTMDEMVGRAECLDFEPATDHWKAKGVDLSQLLYVPEMAVDAARRATTRQDAGLANVLDRRLIAQAAPALDHRSPVELSFAIRNTDRTTGTMLGYEVTKRYRGEGLPDDTIRVNFTGSAGQSFGAFIPRGITLSLAGEANDFVGKGLSGGRLIVRPPRNAAFAAEENVIIGNVALYGATSGEAFVRGVAGERFAVRNSGAQAVVEGVGDHGCEYMTGGRIVVLGPTGRNFAAGMSGGIAYVLDPDGSFALNCNIDMVALEHLDDAAEIAAVRALITRHVELTDSAVGERVLQSWPTSHQQLVVVMPRDFKRVKAAEAKARAESREPALSELVASEQSPQRTPRTSAVSAVARIYG

SEQ ID NO: 224 - protein, 1510 aa, Corynebacterium glutamicum
  PEPTIDE (1)..(1510): GltB protein; proteinID:  WP_011013453; GeneID: 23502412
MKPQGLYNPAHEHDACGVAFIADIHGRPSRSIVDRALEALRNIDHRGAAGAEKNTGDGAGILMQIPDSFYREVSGIELPEAGEYATGIAFLPRGRMAMMDAQKEIERIAKQEGADVLGWRMVPFDSRELGSMAEEAMPSFAQIFLTVPGKSGEDLDRVMFFIRKRCERELGTTNGRDTVYFPSLSSRTIIYKGMLTTLQLEGFFEDLGDARLESAIAIVHSRFSTNTFPSWPLAHPYRFVAHNGEINTVRGNENWMRAREALIKNDKLGNLSSVLPICTPEGSDTARFDEALELLHLGGYSLPHAVAMMIPQAWEHNKTLSPELRDFYEYHSCLMEPWDGPAALAFTDGRFVGAVLDRNGLRPGRITITDSGLVVMASESGVLDLREESVVKRTRVQPGRMFLVDTAEGRIVEDEEIKQKLSEAQPYGEWIRDNFVHLDRLPQTRYNYMAHSRAVLRQRVFGITEEDVDLLLLPMARQGAEAIGSMGSDTPIAALSQRPRMLYDFFAQRFAQVTNPPLDSIREKPVTSMFTLLGAQSDVLNPGPDAARRIRLESPIIDNHELATLINANAHGEWDSFGAAVISGLYPVAHHGAGMKAAIARVRREVSEAIRNGKTLIVLSDRESDERMAPIPALLLTSAVHQYLVQQRTRTQCSLVVESGDAREVHHLAMLIGFGADAINPYMAFETIDELRMKGQLGDLSLDEASRNYIKAATTGVLKVMSKMGIATVSSYRGAQLADVTGLHQDLLDNYFGGIASPISGIGLDEVAADVEARHRSAFLPRPEEHAHRELDLGGEYKWRREGEYHLFNPETIFKLQHATRSGSYEIFKDYTRKVDDQSTRLGTIRGLFEFSTDRKPISVSEVEPVSEIVKRFSTGAMSYGSISAEAHEVLAIAMNRLGGMSNSGEGGEDARRFDVEPNGDWKRSAIKQVASGRFGVTSHYLNNCTDIQIKMAQGAKPGEGGQLPPNKVYPWVAEVRITTPGVGLISPPPHHDIYSIEDLAQLIHDLKNANPRARIHVKLVAEQGVGTVAAGVSKAHADVVLISGHDGGTGASPLTSLKHAGGPWELGLAETQQTLLLNGLRDRIRVQCDGQLKTGRDVVIAALLGAEEFGFATAPLVVEGCIMMRVCHLDTCPVGIATQNPDLRSKFTGKAEHVVNFFTFIAQEVREYLAQLGFRSIDEAVGQAQVLRKRSGIPADSRAAHLDLSPIFHRPETPHFPTQDVRCTKTQEHSLEKALDNAFIDKASDTITRAAAGVETSIVIDSSISNVNRSVGTMLGSAVSRVAGAQGLPDGTITLNLQGCAGNSFGAFIPRGITINLTGDANDFVGKGLSGGKIVIKPSAQAPKQLKNNPNIIAGNVLGYGATSGELFIRGQVGERFCVRNSGATAVVEGIGNHGCEYMTGGRVLVLGPVGENFGAGMSGGIAYLANSPDLNQKINGELVDVVPLSADDLTWADELIARHRELTGSETKLRAQDLVKIMPRDFQKVLNIIETAHAEGQDPAIKIMEAVS

SEQ ID NO: 225 - protein, 1520 aa, Bacillus subtilis
  PEPTIDE (1)..(1520): GltB protein; proteinID:  NP_389727.2; GeneID: 940024
MTYNQMPKAQGLYRPEFEHDACGIGLYAHLKGKQTHDIVKQGLKMLCQLDHRGGQGSDPDTGDGAGLLVQIPDAFFRKECKNINLPEKERYGVGMVFFSQKEDERKKIEKQINALIEQEGQVVLGWRTVPVNVGKIGTVAQKSCPFVRQVFIGASSDLKDNLSFERKLYVIRKQAENWGVTEGLDFYFASLSSQTIVYKGLLTPEQVDAFYSDLQDEAFVSAFALVHSRFSTNTFPTWERAHPNRYLVHNGEINTLRGNINWMRAREQQFVSESFGEDLNKILPILNADGSDSSILDNAFEFFVMAGRKPAHTAMMLIPEPWTENTHMSKEKRAFYEYHSSLMEPWDGPTAISFTDGKQIGAILDRNGLRPARYYVTKDDYIIFSSEVGVIEVEQENVLYKNRLEPGKMLLIDLEEGRIISDEEVKTQIATEYPYQKWLEEELVQVNPDPESREEEQFSDLLTRQKAFGYTYEDIQKYLIPVIKEGKDPLGSMGNDAPLAVLSDRAQSLFNYFKQLFAQVTNPPIDAIREQLVTSTMTWLGAEGDLLHPSERNVRRIKLYTPVLSNEQFYALKTIVHPDLKSQKIDVLFSEDLERGLKDMFTQAEKAISQGVSLLILSDKKMNERLTPIPPLLAVSALHQHLIRKGLRTKVSIIVESGEAREVHHFAALIGYGADAINPYLAYATYKQEIDEGRLDISYEEAVSKYGKSITEGVVKVMSKMGISTVQSYRGAQIFEAVGISRDVIDRYFSGTASQLGGIDLQTIAEEAQRRHREAYQDDYSKTLEPGSDFQWRNGGEHHAFNPKTIHTLQWACRRNDYNLFKQYTKAADEERIGFLRNLFAFDGNRKPLKLEEVESAESIVKRFKTGAMSFGSLSKEAHEALAIAMNRLGGKSNSGEGGEDPKRFVPDENGDDRRSAIKQIASGRFGVKSHYLVNADELQIKMAQGAKPGEGGQLPGNKVYPWVADVRGSTPGVGLISPPPHHDIYSIEDLAQLIHDLKNANRDARISVKLVSKAGVGTIAAGVAKATADVIVISGYDGGTGASPKTSIKHTGLPWELGLAEAHQTLMLNGLRDRVVLETDGKLMTGRDVVMAALLGAEEFGFATAPLVVLGCVMMRACHLDTCPVGVATQNPELRKKFMGDPDHIVNYMLFIAEEVREYMAALGFKTFDEMIGRTDVLHASERAKEHWKASQLDLSTLLYQPEGVRTFQSPQNHKIDQSLDITTILPAVQEAIESGKEADISIEINNTNRVAGTITGSEISKRYGEEGLPEDTIKLHFTGSAGQSFGAFVPKGMTLYLDGDSNDYVGKGLSGGKIIVKSSEGFNSASDDNVIIGNVAFYGATSGEAYINGRAGERFAVRNSGVNVVVEGIGDHGCEYMTGGSVVVLGDVGKNFAAGMSGGIAYVLTEDVKAFKRKCNLEMILFESLEDEKEIQQIKAMLERHTAYTNSQKAEDLLDQWEDSVKKFVKVIPKNYKQMLASIEEQKAAGLSDEEAIMFAFEANTKPKQNTAASGQKQAVVQ

SEQ ID NO: 226 - protein, 1493 aa, Aquifex aeolicus
  PEPTIDE (1)..(1493): GltB protein; proteinID:  NP_214077.1; GeneID: 1193135
MWQEYDSCGVGFVCDIYGRKSHDILKKGIQAVKNLTHRGAIGGDGKTGDGAGILTEIPVKFFMKEFKKLGYEVSSPENLAVGMFFLYEPVEDKVEEAFISEGIKVIGWREVPVNTDAVGKVALKVMPQIKQLFLDMKNIPEEERELRLFFARRKIEKKYEDKVYIPSLSTRTIVYKGMLVAPQLDNFYQDLLDEDYETSFVLFHQRYSTNTLPNWRLAQPLRYLAHNGEINTIQGNRNWMLTLQHELEHEILKGREDLIKPLVSHEESDSASLDRVFELLCLVGYKPEHAMYMLIPPAWEAIPDLPEEVRAFLEYESLLMKPWDGPAAIAFTDGKVIGAHLDRNGLRPARYVITEEGFMVLGSEVGMVDLDDQRVKEKGRLGPGDTILIELGKGVIKKSEEILKELANSKPYKEWLDKHLLRLSEIENDYKLEKPKEDPDRIRKLVAFGWSEEEIKNPIKYMAETGNEMTWAMGDDTPLPPLSEKPQLLYRYFKQRFAQVTNPPIDPIRERAVMSLRMNLGYKRNFLKETEEHAKRLQIDSPILLDYQLKAIENQKEFKVVRIPIAYPKERSYNIVELQDMAGERRISELIMDALYEEIPINDMRLGIETLQRRVEEAVREGADIIILSDRYISKYRVAIPALLALSACVKHLAKQGLAHKVSFIVETGEARDSHQIACLIGYGASAVYPYLAYEVIYELCEKGEIELPYEEAVFKYKEALEKGLLKIMSKMGISTLNSYQGAQIFDSVCLNKDFVEEFFTGTPVTLEADGLEEIEASTLARHNAAYEVEEPKLDIGGHMKARKGGEFHAWSPEVVRALHKFLKTKDYKDYKEFSRLANSQHPTFIRHLLTYKKGNPIPIEEVEPVESILRRFVTGGMSLGALSPEAHETIAEACNRLGMKSNSGEGGEDPERYWTIKNSAIKQVASGRFGVTPTYLASAKDLEIKIAQGAKPGEGGQLPGHKVNEYIAKLRHSQPGVTLISPPPHHDIYSIEDLAQLIHDLKQANPFARVCVKLVAERGVGTIAAGVAKAYADVVQISGAEGGTGASPYSSIKNAGNYWEIGLTETQRVLMENHLRDKIRVRVDGGFRTGKDVVIAALMGAEEFGFGTAAMIAEGCVMARICHTNRCPTGVATQDPNYRKKFKGKVENVMAYFKAVAQEVREILAEMGYRSLDEIIGRTDLLEVVRYDEFPGSKRIKVEALLEKYPENEPRRCMVEKNDNPAPNFNDKILEDLLPYIEEGIPVEKEYTIRNVDRTIPTKINYFISLFYGDRGLPEDTIKLTFRGTAGQSFGAFNHRGVSLTLIGDANDYVGKGMYGGRIVIIPDGVKETDKNVIMGNTCLYGATGGELFAAGVAGERFAVRNSGATAVIEGAGLHCCEYMTGGVVVVLGKVGFNLGAGMTGGHAYVLDDELDKKLNYAYVYARRLVGEEEIKELRELIEKHYEYTKSPKAKEILENWEEYVKKFWKVIPLEQCSRDPYGDSDACEVEFLGRK

SEQ ID NO: 227 - protein, 1550 aa, Synechocystis sp.
  PEPTIDE (1)..(1550): GltB protein; proteinID:  CAA56652.1; GeneID: 14615869
MPCHEGLHPLVPNFCTVTSPMNSSHLAPQVQGLYDPQNEHDACGVGFIVQMKGKVSHDIVEQGLQMLVNLEHRGACGCEPNTGDGAGILIQVPHKFIQKIAGAEGITIPAPGQYAVGNIYGSPDPLARAEARQKFNDIVAQEGLKVLGWRDIPTQNEPLGETAIASEPFMQQVYIARPEGLTDDLDFERKLYVIRKLTHGAIRSPKIDTYWYVASLSARTLVYKGMLTTAQVGQYYPELHDPDMESALALVHSRFSTNTFPSWERSHPYRYIAHNGEINTMRGNVNWMQARQALFESSLFGEDMAKVQPVINIDGSDSTIFDNALELLYLAGRSLPHAVMMMIPEPWSAHESMSQEKKAFYKYHSCLMEPWDGPASIAFTNGKMMGAVLDRNGLRPSRYYVTKDDLVIMASEAGVLPIEPERVAKKGRLQPGRMFLVDMEQGRIIADEEIKQEIVSQHPYGEWLAANLKSLEQLPSPGNVPGTDAESLRQRQMAFGYTFEELRILLAPMGRDGVEAIGSMGADTPLAVLSDKPKLLYNYFQQLFAQVTNPPIDSIREEIITSAETTIGGEGNLLDPRPESCRLIELKTPILTNEDLAKLKALDDDEFKSVTLDILFDPNQGEAGLKTALDNLFTEADQAISQGANLIILSDRQVSAEKAAIPALLAVSGLHHHLIRNGSRTKVGLVLESGEPREVHHFAVLLGYGCGAINPYLAFETLDGMIAEGLLVNVDHKTACKNYIKAATKGVIKVASKIGISTIQSYRGAQIFEAVGLNQSVIDEYFCRTSSRIQGSDLGVIAQEAILRHQHAFAPRPGDLHTLDVGGEYQWRKDGEEHLFSPQTIHLLQRAVREGNYELYKQYAALVNEQNQKFFTLRGLLDFQDRESIPLEEVEPIEAIMKRFKTGAMSYGSISKEAHESLAIAMNRIGGKSNTGEGGEDPERFTWTNDQGDSKNSAIKQVASGRFGVTSLYLSQAKEIQIKMAQGAKPGEGGQLPGKKVYPWIAKVRHSTPGVGLISPPPHHDIYSIEDLAELIHDLKNANREARINVKLVSEVGVGTIAAGVAKAHADVVLVSGYDGGTGASPQTSIKHAGLPWELGLAETHQTLVLNNLRSRIVVETDGQMKTGRDVAIAALLGAEEFGFSTAPLVSLGCIMMRACHLNTCPVGIATQNPELRAKFTGDPAHAVNFMTFIATELREVMAQLGFRTINEMVGRTDILEPKKAVAHWKAKGIDLSTILHQPEVGDDVGRYCQIPQDHGLQHSLDITQLLDLCQPAIAKGEKVTATLPITNINRVVGTIVGNEITKRHWEGLPEDTVHLHFQGSAGQSFGAFIPKGMTLELEGDANDYLGKGLSGGKIIVYPPKGSSFIASENIIAGNVCLYGATAGEVYISGMVGERFCVRNSGVNTVVEAVGDHGCEYMTGGKVVVLGQTGRNFAAGMSGGVAYIFDETGDFATRCNSAMVGLEKLEDPEEIKDLKELIQNHVNYTDSAKGKAVLADWEASIPKFVKVMPRDYKRVLQAIKKALEAGLSGDDALNAAFEENAKDVARIGGS

SEQ ID NO: 228 - protein, 1526 aa, Petrotoga miotherma
  PEPTIDE (1)..(1526): GltB protein; proteinID:  ABX32483.1; GeneID: 5756596
MNKGLYDPKFEHDACGVGLVASTKGVKSHEIVDKSLTVLKNMAHRGARGRGENDGDGAGVLLQIPHDFLIKESKHLGFTLPNESEYAVGMIFCPRDKTLTNIFKQQFEKIATNQGQKVIGWRDVPINEAFVGPTALKSMPSFLQVFIVKNPTLKSGIEFERKLYLIRKKSEKEIKIPHIDPNKAFYIASLSSKTIIYKGMLTAEQLKYFFSDLTDPLFKSAFSIVHSRFSTNTFPSWERAHPYRYMVHNGEINTIIGNVNWMRARQSKVSTDIFGENINDIFPIIDEDGSDSAMFDNNLEFLYLSGRSLPHSIMMMMPEPWENNQTMDAEKKAFYEYHSCLMEPWDGPAAIIFTDGLKVGATLDRNGLRPLRYYITDDELILASEAGVLEIPPQKILRKGRITSGNMLLLDIESGRILNDEEIKRPIISEKPYFSWVKENIVNLEDLPEHSKKGNMEIDVVPLTTKQKCFGYTFEDIEMIIEPMVIGASDPVGAMGDDTPLAVLSERPKLLYEYFKQLFAQVTNPPIDAIREKIITSTHLYIGSEGNLIDPSSINCRQIKIKNPILTNDEMEKIKNLDLEGFKAITLPILYKVKDGEEGLKKAITNLFQKADSAINDGANILILTDKGVNQNHAPIPALLAVSGLHHHLVRKENRTEIGIILESAEPREVHHFCTLLSYGASAINPYLTYESIENLVNKGYIKGLKYEEAVKRYKDASLKGIQKVLSKLGISTLQGYQGAQTFEIVGIKKSIVEQFFTGTTSQVEGIGLKEIAQEVSKRHSSAFNQVNRGSLLDSEGLMKWRAKGEYHLYNPKSIYYLQNAVKNNDYELFKKFSQSIVDEDAKLYSLRSLFEFNFDKTKAIPLDEVEPVESIVKRFKTGAMSFGSISQEAHETIAIAMNRIGAKSNTGEGGEDSNRFAKEQNRDSKNSSIKQVASGRFGVTINYLNNAQEIQIKVAQGAKPGEGGELPGNKVYPWVAKVRNSIPGVTLISPPPHHDIYSIEDLAELIYDLKNANRNARINVKLVSKSGVGTIAAGVAKAGADVILISGFDGGTGASPRTSIRHAGLPWELGLAETHQTLVLNKLRDRVTLETDGKLLTGKDIVIAALLGAEEFGFATIVLVALGCVMMRVCNLDTCPVGIATQNPVLRKNFKGDPQYIVNLMSFLASEVREYMANLGFRTFSEMVGRVDKLRQKEIKSHWKAHSIDLSKLLYKPEIKDYSFSQYPKPINNGLSDILDITKLLPICQNALENGEKIEATLAIKNVNRTVGTILGSEIIKRYGEEGLPEDTIKIHFKGSAGQSFGAFIPKGETLILEGDSNDYIAKGLSGGKIIVYPPKDSRFYNEENVIVGNVALYGATSGETYISGLAGERFAVRNSGSTAVVEGVGEHGCEYMTGGKVVILGKTGRNFAAGMSGGIAYVYDKDNSFESKCNKDTVLLEKVEDENEKNEIKELIKKHYKYTSSNVAKNILNNWGKTKERFVKVIPKDYKRMMDVVNRMHIEGITGEEALMKAFEENYKQQSLVQTH

SEQ ID NO: 229 - DNA, 1419 bp, Escherichia coli
  CDS (1)..(1419): GltD gene encoding glutamate synthase [NADPH] small chain
atgagtcagaatgtttatcaatttatcgacctgcagcgcgttgatccgccaaagaaaccgctgaagatccgcaaaattgagtttgttgaaatttacgagccgttttccgaaggccaggccaaagcgcaggctgaccgctgcctgtcgtgcggcaacccatactgcgagtggaaatgcccggtacacaactacatcccgaactggctgaagctcgccaacgaggggcgtatttttgaagcggcggaactgtcgcaccagaccaacaccctgccggaagtttgcggacgagtctgcccgcaagaccgtctgtgcgaaggttcctgcactctgaacgatgagtttggcgcggtgaccatcggcaacattgagcgctatatcaacgataaagcgttcgagatgggctggcgtccggatatgtctggtgtgaaacagaccggtaaaaaagtggcgattatcggcgcaggcccggcaggtctggcgtgtgcggatgtcctgacgcgtaacggcgtaaaagccgttgtcttcgaccgtcatccagaaattggcgggctgctgaccttcggtattccggccttcaagctggaaaaagaggtaatgacgcgtcgccgtgaaatcttcaccggcatgggtattgaattcaaactcaataccgaagtgggccgcgacgtacagctggacgatctgctgagtgattacgatgccgtgttccttggcgtcgggacttatcagtcaatgcgcggcgggctggaaaacgaagacgccgatggcgtgtacgcagcgctgccgttcctcatcgccaacaccaaacagttaatgggctttggtgaaacccgcgacgaaccgttcgtcagcatggaaggcaaacgcgtggtggtccttggcggtggcgacactgcgatggactgcgtgcgtacgtccgtgcgccagggagcgaagcacgttacctgtgcctatcgtcgtgatgaagagaacatgccgggttcccgccgcgaagtgaaaaacgcgcgggaagaaggcgtagagttcaaattcaacgtccagccgctgggtattgaagtgaacggtaacggcaaagtcagcggcgtaaaaatggtgcgtaccgaaatgggcgaaccggacgccaaaggccgtcgccgcgcggagatcgttgcaggttccgaacatatcgttccggcagatgcggtgatcatggcgtttggtttccgtccacacaacatggaatggctggcaaaacacagcgtcgagctggattcacaaggccgcatcatcgccccggaaggcagcgacaacgccttccagaccagcaacccgaaaatctttgctggcggcgatatcgtccgtggttccgatctggtggtgaccgctattgccgaaggtcgtaaggcggcagacggtattatgaactggctggaagtttaa

SEQ ID NO: 230 - protein, 472 aa, Escherichia coli
MSQNVYQFIDLQRVDPPKKPLKIRKIEFVEIYEPFSEGQAKAQADRCLSCGNPYCEWKCPVHNYIPNWLKLANEGRIFEAAELSHQTNTLPEVCGRVCPQDRLCEGSCTLNDEFGAVTIGNIERYINDKAFEMGWRPDMSGVKQTGKKVAIIGAGPAGLACADVLTRNGVKAVVFDRHPEIGGLLTFGIPAFKLEKEVMTRRREIFTGMGIEFKLNTEVGRDVQLDDLLSDYDAVFLGVGTYQSMRGGLENEDADGVYAALPFLIANTKQLMGFGETRDEPFVSMEGKRVVVLGGGDTAMDCVRTSVRQGAKHVTCAYRRDEENMPGSRREVKNAREEGVEFKFNVQPLGIEVNGNGKVSGVKMVRTEMGEPDAKGRRRAEIVAGSEHIVPADAVIMAFGFRPHNMEWLAKHSVELDSQGRIIAPEGSDNAFQTSNPKIFAGGDIVRGSDLVVTAIAEGRKAADGIMNWLEV

SEQ ID NO: 231 - protein, 472 aa, Pseudomonas putida
  PEPTIDE (1)..(472): GltD protein; proteinID:  AGA75858.1; GeneID: 14291349
MAERLNNDFQFIEVGRKDPKKKLLRQRKKEFVEIYEPFKPQQSVEQAHRCLGCGNPYCEWKCPVHNFIPNWLKLVSEGNILAAAELSHQTNTLPEVCGRVCPQDRLCEGACTLNDGFGAVTIGSVEKYITDTAFAMGWRPDMSKVKPTGKRVAIIGAGPAGLGCADVLVRAGVTPVVFDRNPEIGGLLTFGIPEFKLEKTVLSNRREVFTGMGIEFRLNTEVGKDVTMEQLLAEYDAVFMGMGTYTYMKGGFPGEDLPGVHDALDFLIANVNRNLGFEKSPEDFVDMQGKKVVVLGGGDTAMDCNRTSIRHGAKSVTCAYRRDEANMPGSRREVKNAKEEGVKFLYNRQPIAIVGEDKVEGVKVVETRLGEPDARGRRSPEPIPGSEEILPADAVVIAFGFRPSPAPWFEQHGIQLDSQGRVVAPEKGKFKHQTSNPKVFAGGDMVRGSDLVVTAIFEGRTAAEGILDYLEV

SEQ ID NO: 232 - protein, 488 aa, Deinococcus swuensis
  PEPTIDE (1)..(488): GltD protein; proteinID: AFD24117.1; GeneID: 12815926
MSKITGFLEQPRVKEKYQPVEARLKNYAEFVLPLANEAAQKQAVRCMDCGIPFCNNGCPVGNIIPDFNNLVYENDWLSAIETLHSTNNFPEFTGRICPAPCEAACTLNINDDPVGIKSIELAIIERAWQEGWVRPQPPQVKTGKTVAVIGSGPAGLAAAQQLARAGHAVTVFEKNDRVGGLLRYGIPDFKMEKHHIDRRVQQMEAEGVTFRTGVLVGTWDRKSTVTNLAKSAVTPDELRAEFDAVLLCGGAEQPRDLPVPGRELDGVHFAMEFLPGQNRVNAGDRLKKQLRADGKHVVVIGGGDTGSDCVGTSNRHGAAGVTQFEVMPQPPEQENKPLVWPYWPLKLRTSSSHEEGVTREFAIATKEFIGEGSKLTGVKTVRIELVDGHLKEIEGSEEIHSAELVLLAMGFVSPVGSVLDAFGIEKDTRGNALAGTEEEGGYVTNLPGVFAAGDMRRGQSLVVWAIREGRQAARAMDQYLMGTSVLPR

SEQ ID NO: 233 - protein, 447 aa, Methanoculleus chikugoensis
  PEPTIDE (1)..(447): GltD protein; proteinID: WP_011844123; GeneID: 4846778
MSDRPADVRIKDFKEVDGGLSADEAIAEAERCLQCKKPLCVKGCPVCIDIPAFIGHVAEGNFPAAARALKEQNMLPAICGRVCPQETQCEGVCILGNKDTPIRIGALERFVADRERESGAELPETAKPTGKRVAVVGSGPAGLTAAAELARAGHAVTIYESLHEAGGVLTYGIPAFRLPKDVVRAEIDQVLALGARLKKNHLVGRSVSTDELLGYDAVFLGTGAGLPAFMCIPGENLNGVYSANEFLTRVNLMHADAFPESDTPVLHAARVAVIGGGNVAMDAARVARRLGAKVSLIYRRGEEEMPARRAEVVHAKEEEIEFYTCANPTRILGEQSVTGVECVKMSLCGIDASGRRSPEPIEGSEFTLDVDMVIQAIGTSPNPLLVSLIPGLERGRRGNVVVDKNGRTSIPHVYAGGDIATGAATVIEAMGSAKKAAAAIDAMLKGE

SEQ ID NO: 234 - protein, 476 aa, Acidobacterium sp.?
  PEPTIDE (1)..(476): GltD protein; proteinID: CBE67927; GeneID: 13099507
MGKATGFIEFSRSKPPSRPVTERIGDYRHVYQAYPIEDLTRQAARCMDCGIPFCHQGCPLGNLIPDWNDLVYNNNWRAAIERLHQTNNFPEFTGLLCPAPCEGSCVLGINQDPVTIKSLELSIVDRAFEEGWIVPEPPVTRTWKKVAVIGSGPSGLAAAAQLNRAGHTVTVFEKSGRAGGLLRYGIPEFKMEKRVLDRRLDLMRAEGVVFRPGMNVGEDVTAEDLRRDFDAILLAGGAGNPRDLTVPGRELKGVYFAMEFLTQQNQRCQGDDANLMEPITAAGKHVVIIGGGDTGADCLGTVHRQGALSVSQLELMPTPPSLRAKDNPWPLWPNIFRTSSAHEEGGDRVYAVATTELSGDANGHVRTLHGHQVSRVVTNGRASFEPLPNSGFEMKADLVLLAMGFVGPEKSRLLADLDVRMNDRGTVGRDDQWMTNVPGVFTAGDMQRGQSLIVWAIDDGRRAAAAIDTYLANQPS

SEQ ID NO: 235 - protein, 506 aa, Corynebacterium glutamicum
  PEPTIDE (1)..(506): GltD protein; proteinID: WP_011013454; GeneID: 23502411
MADPQGFIKYSRREPAHRPVPLRLMDYSEVYEKAPAGQIEEQAARCMDCGVPFCHEGCPLGNIIPEWNDLVRQGRWKEAYDRLHATNNFPEFTGRLCPAPCEGACVLGINDDSVTIKNVELEIVEKAFQEGWVQPVVASMSTGLSVAVVGSGPAGLAAAQQLTRAGHSVTVFERDDRLGGLMRYGVPEYKMENRWIDRRIQQMEAEGTTFQVGTSPRAAELALFDAILLATGTPVARELSVPGHDLNGIHAAMDYLTAQNRINEGDGEVSPINAKGKKVVIIGGGDTGTDCFGTALRQGAESVTQFDIRPRAPFQRADSTPWPMYPNLFRTATAHEEGEYIITGDESADEIAALGLAERAAGSTLGERKFAVNTVEFHGNNGHVTGLTGNQIRVVNGKREPIEGTEFPFEADLVLVALGFTGAEQGGLAHELGVGFDDRGRILRDSEYRSPTNSRVYIAGDNGRGQSLIVWAIAEGRACAAAIDADLMGETALPVAVAPQDVPLAV

SEQ ID NO: 236 - protein, 493 aa, Bacillus subtilis
  PEPTIDE (1)..(493): GltD protein; proteinID: NP_389726.2; GeneID: 940053
MGKPTGFMEIKREKPAERDPLTRLKDWKEYSAPFSEEASKRQGARCMDCGTPFCQIGADINGFTSGCPIYNLIPEWNDLVYRGRWKEALERLLKTNNFPEFTGRVCPAPCEGSCTLAISDPAVSIKNIERTIIDKGFENGWIQPRIPKKRTGKKVAIVGSGPAGLASADQLNQAGHSVTVFERADRAGGLLTYGIPNMKLEKGIVERRIKLLTQEGIDFVTNTEIGVDITADELKEQFDAVILCTGAQKQRDLLIEGRDSKGVHYAMDYLTLATKSYLDSNFKDKQFIDAKGKDVIVIGGGDTGADCVATALRQKAKSVHQFGKHPKLPPARTNDNMWPEQPHVFTLEYAYEEAEAKFGRDPREYSIQTTKMVADKNGKLKELHTIQMEKVKNEHGKYEFRELPGTEKVWPAQLVFIAIGFEGTEQPLLKQFGVNSVNNKISAAYGDYQTNIDGVFAAGDARRGQSLIVWAINEGREVAREVDRYLMGSSVLP

SEQ ID NO: 237 - protein, 476 aa, Aquifex aeolicus
  PEPTIDE (1)..(476): GltD protein; proteinID: NP_214414.1; GeneID: 1193834
MAKKIRYLDRNKEPTLPPEERVKTFREFELGYSVNLALDEAQRCLFCKDAEQRCIKGCPVHVDIPGFIKKITEGDLVGAYKVITQSDIFPSICGRVCPQERQCEGSCILYYDTVRNRKNKGLPVAIGALEKFVGDFIRISGIEIEEEKEPPTGFRVAVIGAGPAGLSCAHELAKKGHEVHVYEALPKPGGVMYYGIPNARLDKSIIEWEVKRLEKLGIKFFYGYLIGKNITLQELREKYDAVFIAVGAGRGKLGLPGDHLKGVYSAIDFLMRVNLYKANEFPKKGVPVELGKRTVIIGGGFTAVDCAITANRLGVETHVVYRRTRETSSARQEEWDHLMEEGVKIHWLTQPVEVIGNEKGEVVGLKCIKMELGEPDESGRPRPVPVPNSEHIIECDSVIFAIGQRANPIAYEGSGIKTTKWGTIEVNERYETNLEGVFAGGDVINGGDRVVVALAHGKEAAKYIHEYLMSNKEVRK

SEQ ID NO: 238 - protein, 494 aa, Synechocystis sp.
  PEPTIDE (1)..(494): GltD protein; proteinID: BAA16777.1; GeneID:14615623
MGKPTGFLEYTREIPQELSPGDRLRNWDEFHVTMPDKQVETQGARCMDCGTPFCHTGSLISGMASGCPINNLIPEFNDLVYRGLWREALDRLHKTNNFPEFTGRVCPAPCEGSCVLGINNPPVTIKNIEYSIIEKGWQEGWVTPEPPAKRTGKKVAVVGSGPAGLAAAAQLNKAGHWVTVYEREDRPGGLLMYGIPNMKLDKEEVVLRRLNVLEAEGVTFVCNTEIGKDLPPETLLKDYDAVVLCTGATKPRDLAIAGRELEGIHFAMEFLTANTKAILDKTPGPNFISAKDKDVVIIGGGDTGTDCVGTSLRHGCRSLVQLEIMPKPPEERAANNPWPEWPKVYKMDYGQEEAAAVYGHDPRSYLTTATKIEGDDQGRVKAVHTVDVRWEKDGQGRFIPQQVAGTEQVRPAQLVLLAMGFVGPESQLLDAMKLDKDARGNIKAEYGQYETSIPGVFAAGDCRRGQSLVVWAFNEGRGAAKACDLYLMGETDLP

SEQ ID NO: 239 - protein, 242 aa, Petrotoga miotherma
  PEPTIDE (1)..(242): GltD protein; proteinID: ABX32484.1; GeneID:5756597
MGDPQGFLKYERKNPEERPPKMRINDWEELYIEMEKDELRIQAARCMNCGTPFCHSGILINNMVSGCPLNNLIPEWNDLAYRNLWREAYERLIETNSFPEFTGRVCPAPCEKACVNNLVKDPVSIKSIEYYIIEEAFKNGWVEEDKPSYSTGKKVAVVGSGPAGLSCAWELNRYGHEVTVFEKNEYPGGLLTYGIPNMKLDKKIAKRRIELMGKSGIQFKTNVNVGKDYPVQKLKEEFDAVT

SEQ ID NO: 240 - protein, 471 aa, Escherichia coli
  PEPTIDE (1)..(471): GltX protein; proteinID: NP_416899.1; GeneID:946906
MKIKTRFAPSPTGYLHVGGARTALYSWLFARNHGGEFVLRIEDTDLERSTPEAIEAIMDGMNWLSLEWDEGPYYQTKRFDRYNAVIDQMLEEGTAYKCYCSKERLEALREEQMAKGEKPRYDGRCRHSHEHHADDEPCVVRFANPQEGSVVFDDQIRGPIEFSNQELDDLIIRRTDGSPTYNFCVVVDDWDMEITHVIRGEDHINNTPRQINILKALKAPVPVYAHVSMINGDDGKKLSKRHGAVSVMQYRDDGYLPEALLNYLVRLGWSHGDQEIFTREEMIKYFTLNAVSKSASAFNTDKLLWLNHHYINALPPEYVATHLQWHIEQENIDTRNGPQLADLVKLLGERCKTLKEMAQSCRYFYEDFAEFDADAAKKHLRPVARQPLEVVRDKLAAITDWTAENVHHAIQATADELEVGMGKVGMPLRVAVTGAGQSPALDVTVHAIGKTRSIERINKALDFIAERENQQ

SEQ ID NO: 241 - DNA, 1140 bp, Klebsiella pneumoniae
  CDS (1)..(1140): pqqE gene encoding PqqA peptide cyclase
atgtcgcagtcgaagcccaccgtcaatccgccactgtggttacttgcagagcttacgtaccgctgtccccttcagtgtccgtactgctcgaatccgttggacttcgcgcgccaagataaggaattaacgaccgaacagtggattgaagtatttcgtcaggcgcgtgcaatgggatccgtacaattgggttttagtggtggagaaccattgactcgtaaggacttaccagaattgatccgcgcagcacgcgatctggggttctacactaaccttatcacatcggggatcggcctgactgagagtaagcttgacgcgttttccgaggctggtttggaccacatccagatctcattccaggcaagtgacgaggttttgaatgctgcacttgcaggtaataaaaaagcattccaacagaaacttgctatggctaaagcagttaaggcgcgtgattatccgatggtacttaattttgtcttacatcgtcataatattgaccaattggacaaaatcattgaattgtgcatcgaactggaagctgatgatgtcgagttggcgacgtgtcagttttacggctgggcttttttaaaccgcgagggcctgttgcctacccgtgagcagattgcgcgcgccgaacaagtcgtagcggactaccgccagaagatggccgcctcgggaaatctgactaatttactgttcgttacaccagactactacgaggaacgtccaaaagggtgcatgggtggctggggttccatttttttatcggtgacccccgaaggcaccgctctgccatgccacagtgctcgccagttacccgttgcgttcccgtcagttcttgaacagagcttggaaagtatttggtacgacagtttcgggtttaatcgctatcgcggatacgactggatgcccgagccgtgccgttcatgtgatgagaaggagaaagacttcggcgggtgccgctgtcaagccttcatgttgacgggaagcgcagacaatgctgatcctgtatgctctaaaagtcctcaccatcacaagattcttgaagcgcgccgtgaggcagcctgttccgatattaaagtttctcagttacagtttcgcaatcgtactcgtagtcagttgatttaccagactcgtgatctg

SEQ ID NO: 242 - protein, 380 aa, Klebsiella pneumoniae
MSQSKPTVNPPLWLLAELTYRCPLQCPYCSNPLDFARQDKELTTEQWIEVFRQARAMGSVQLGFSGGEPLTRKDLPELIRAARDLGFYTNLITSGIGLTESKLDAFSEAGLDHIQISFQASDEVLNAALAGNKKAFQQKLAMAKAVKARDYPMVLNFVLHRHNIDQLDKIIELCIELEADDVELATCQFYGWAFLNREGLLPTREQIARAEQVVADYRQKMAASGNLTNLLFVTPDYYEERPKGCMGGWGSIFLSVTPEGTALPCHSARQLPVAFPSVLEQSLESIWYDSFGFNRYRGYDWMPEPCRSCDEKEKDFGGCRCQAFMLTGSADNADPVCSKSPHHHKILEARREAACSDIKVSQLQFRNRTRSQLIYQTRDL

SEQ ID NO: 243 - protein, 360 aa, Planctomycetaceae bacterium
  PEPTIDE (1)..(360): PqqE protein, Xaa may be D (Asp) at position 221 or E (Glu) at position 346
MKPTQTIDAPYCLIAELTYRCPLRCPYCSNPLDLHALKTELSTEVWQQLLEEASRIGIVQVHFTGGEPLVRNDIPELVATAREAGLYSHLITAGVNVTAARLSELRRAGLDAIQVSLQDTQPESNDWLAGIPSFDKKRETFLAAKQIGFPVTLNVVVHRHNIERVPDMLTLAEAWGADRLEIAHVQYVGWAQLNHRALLPTREQVRQAEAIVAAARQHASXKMQILHVMPDRYQDLPKPCMSGWGRVYMTVNPDGTILPCQAARCIPDIDFPNAAQMSLSEAWQSPAFRRFRGTDWMPEPCRSCDHRHVDFGGCRCQAYLVTGDASATDPVCHLSPDRPAIDAAIXTAATPTTDLTFRHY

SEQ ID NO: 244 - protein, 378 aa, Chroococcidiopsis cubana
  PEPTIDE (1)..(378): PqqE protein
MSEFLPVKTTDRPLTLIAELTYRCPLSCPYCSNPLNYHDKHYRQELATDDWLRTIRQARNLGVWQLGFSGGEPLLRQDLEVLVKAAAQVELYTTLVTAGTLLTLERATQLCHAGLNHIQISIQDSRAAQSDYLAGIRCFEQKLAAARIVKDLGLPLTLNFVLHRQNIERLEEMLELCEQLQADRVELAQTQYYGWALHNRAALLPTPQQLERAAQIVAVAKKSRICPMGILYVIPDYYEDYPKPCMGGWGRRALVVAPHGDVMPCQAASSIPEIEFANVRDRDLDWIWFESPAFNRFRGTDWMSEPCRSCDRAQIDFGGCRCQALLLTNNAAATDPVCHLSPHHDLVVTAREEALEQSLPLVHRSSVASLGVKEAYHK

SEQ ID NO: 245 - protein, 383 aa, Azotobacter vinelandii
  PEPTIDE (1)..(383): PqqE protein ;  proteinID:WP_012702666.1?; GeneID:7763045
MSAPGSSCTEPGPPLWLLAELTYRCPLQCPYCSNPLDFARHGAELSTAEWIEVFRQARELGAAQLGFSGGEPLVRQDLSELIGAARGLGYYTNLITSGIGLSEARIAEFATAGLDHIQVSFQAADAELNDLLAGSGKAFARKLAMARAVKAQGYPMVLNFVTHRHNIDAIERIIELCLELEADYIELATCQFYGWAELNRAGLLPTRAQLERAERITNQWREKLAAQGHPCKLIFVTPDYYEERPKACMGGWASLFLDIAPDGTALPCHNARMLPVQFPNVREHSLRHIWYDSFGFNRFRGDDWLPEPCRSCDEKGRDFGGCRCQAFLLTGDAEATDPVCAKSAHHGLILDARRQAEEAPLGLERLVHRNARTSEIICRSRSE

SEQ ID NO: 246 - protein, 364 aa, Streptomyces rochei
  PEPTIDE (1)..(364): PqqE protein
MADPAVGAPAGMLIELTHRCPLHCPYCSNPLELVRREAELTCEQWTDILTQARELGVVQMHFSGGEPLARPDLPDLVGHARRLGAYVNLVTSGVGLTAERAHDLARRGVDHVQLSLQDADPAAGQAIAGARVHTAKLEAARAVTAAGLPLTVNIVLHRGNIDRTGRMVDLAVDLGADRIELANTQYYGWGLRNRAALMPTAAQLAAAREAVRHARTRYAGGPELVYVAADYYDDRPKPCMDGWGSTQLTVTPAGDVLPCPAAYAITTLPVENALRRPLSEIWYASRSFNAYRGTGWMREPCRTCPERHADHGGCRCQAFQLTGDAAATDPACGLSPHRSLVDAALAEVTDGPVPAFVPRGPVPA

SEQ ID NO: 247 - protein, 23 aa, Klebsiella pneumoniae
  PEPTIDE (1)..(23): PqqA peptide ;  proteinID: YP_002919578.1?; GeneID:7945737
MWKKPAFIDLRLGLEVTLYISNR

SEQ ID NO: 248 - protein, 308 aa, Klebsiella pneumoniae
  PEPTIDE (1)..(308): PqqB protein ;  proteinID: AEJ98290.1?; GeneID:12545751
MFIKVLGSAAGGGFPQWNCNCANCQGLRDGTIQAAPRTQSSIIVSDNGKEWVLCNASPDISQQIAHTPELNKAGVLRGTHIGGIILTDSQIDHTTGLLSLREGCPHQVWCTPEVHEDLSTGFPVFTMLRHWNGGLVHHPIAPQQPFTVDACPDLQFTAVPIASNAPPYSPYRDRPLPGHNVALFIENRRNGQTLFYAPGLGEPDETLLPWLQKADCLLIDGTVWQDDELQAAGVGRNTGRDMGHLALGDEHGMMALLASLPAKRKILIHINNTNPILNKQSPQRQALTQQGIEVSWDGMAITLQDTAC

SEQ ID NO: 249 - protein, 251 aa, Klebsiella pneumoniae
  PEPTIDE (1)..(251): PqqC protein ;  proteinID: AEJ98291.1?; GeneID:12545752
MLITDTLSPQAFEEALRAKGAFYHIHHPYHIAMHNGDATRKQIQGWVANRFYYQTTIPLKDAAIMANCPDAQTRRKWVQRILDHDGSHGEDGGIEAWLRLGEAVGLSRDDLLSERHVLPGVRFAVDAYLNFARRACWQEAACSSLTELFAPQIHQSRLDSWPQHYPWIKEEGYFYFRSRLSQANRDVEHGLALAKAYCDSAEKQNRMLEILQFKLDILWSMLDAMTMAYALQRPPYHTVTDKAAWHTTRLV

SEQ ID NO: 250 - protein, 92 aa, Klebsiella pneumoniae
  PEPTIDE (1)..(92): PqqD protein ;  proteinID: YP_002919581.1?; GeneID:7948269
MQKTSIVAFRRGYRLQWEAAQESHVILYPEGMAKLNETAAAILELVDGRRDVAAIIAMLNERFPEAGGVDDDVVEFLQIACQQKWITCREPE

SEQ ID NO: 251 - protein, 761 aa, Klebsiella pneumoniae
  PEPTIDE (1)..(761): PqqF protein ;  proteinID: AEJ98294.1; GeneID:12545755
MTLATRTVTLPGGLQATLVHQPQADRAAALARVAAGSHHEPSRFPGLAHLLEHLLFYGGERYQDDDRLMGWVQRQGGSVNATTLARHSAFFFEVAADALADGVARLQEMLQAPLLLREDIQREVAVIDAEYRLIQQHEPSRREAAVRHAASAPAAFRRFQVGSADALAGDLAALQAALGDFHRTHYVARRMQLWLQGPQSLEALGELAARFAAGLAAGEAPPPAPPLRLGEFTALQLAVSSQPALWRCPLIALSDNVTLLREFLLDEAPGSLMAGLRQRRLAGDVALNWLYQDRHLGWLALVFASDRPEEVDRQITHWLQALQQTTPEQQQHYYQLSRRRFQALSPLDQLRQRAFGFAPGAPPAGFADFCAALQVAPSVSLACQTVSPGEPVATQGFSLPLSRWRRRPESDPALAFAFYPQAAGDLVAKCPEKAAPLLHLPSPGDPPRLLLRPPFYCSPDQAEGLARGEQLRPLLAALRHAGGHGEWHLFDGSWQLTLQLPEPGRRPEAILQAILRQLALPVASLTPSPESIAIRHLMAQLPERLGTSGHQKGWLAALAGGSAEDAQWVARQLSLITAPVNPPMPAPAPCRRGVERLVYPGGDTALLVFIPLPDGASLAALRLLAQHCEPLFFQRLRVEQQIGYVVSCRYQRVADRDGLLMALQSPDRRAGELLRCGKDFLRQLAPMDEATFRPLQQRLAAQIRASRPPEARALSALRQEYGLPELTPQAVDALRVAEVADLAREMTRRRRRWQVLFTTGD

SEQ ID NO: 252 - DNA, 867 bp, Methanobacterium thermoautotrophicum
  CDS (1)..(867): NifB gene encoding FeMo cofactor biosynthesis protein
atgccagaccaaagacagactcgttttgctcacatcaccaaggcgcatccctgcttcaatgaaaaattacatgaccgtgtagggcgtgtccatgttcctatcgcgccacgttgcaatatccattgcaagttttgtactcgtgatatcaatgaatgtgaacggcgtccaggtgtgacggggcgccttatgacggctgatgatgctataaagcacgttgaaaaagtgaaagaggagatgccgatatccgtcataggagttgctgggcctggggatgctttggcgaatgaagagacgttcgagttttttaaaaaggccagcaagaaatttcccgacttactgaagtgcatgagcacaaatggacttctgttaccggatcgtgcagacgaactggccgagttaggcatcaacacagtaacagtgacagtaaacgcggtagatccagaaatcggcgaaaaaatctacagctttgtagtttataaagataaggtatatcatggtagagaggcatttgaagttctgtcgcgcaaccagttggaaggtatcgagaaacttgcggaacgtggaatcattgtcaaagtcaattcagtgttgataccggggttaaacgatgaacatattgtggacatcgcccgcgaagtaaaaaagcgtggggcatcattaatgaatatcataccattgatccccatgggtgagatgaaggattacccaagacccacttgtgagcagattgagagagtccgcaatgaagtggagaagatcatacccgtgtttcgtgcgtgtactcagtgtcgcgcggatgcctacggaattccggggaagaaagaggccgacaaacacctggacatgactccggcgagccactactaa

SEQ ID NO: 253 - protein, 288 aa, Methanobacterium thermoautotrophicum
MPDQRQTRFAHITKAHPCFNEKLHDRVGRVHVPIAPRCNIHCKFCTRDINECERRPGVTGRLMTADDAIKHVEKVKEEMPISVIGVAGPGDALANEETFEFFKKASKKFPDLLKCMSTNGLLLPDRADELAELGINTVTVTVNAVDPEIGEKIYSFVVYKDKVYHGREAFEVLSRNQLEGIEKLAERGIIVKVNSVLIPGLNDEHIVDIAREVKKRGASLMNIIPLIPMGEMKDYPRPTCEQIERVRNEVEKIIPVFRACTQCRADAYGIPGKKEADKHLDMTPASHY

SEQ ID NO: 254 - protein, 499 aa, Paenibacillus polymyxa
  PEPTIDE (1)..(499): NifF protein ;  proteinID: AHC18644.1; GeneID:17918478
MDSLADLSETPLALETLRRHPCYNEEAHRYFARIHLPVAPACNIQCHYCNRKFDCVNESRPGVVSELLTPEQAASKTYGVAAQLMQLSVVGIAGPGDPLANAEATFDTFRRVRETVKDVIFCLSTNGLTLIRHIDRIVELGISHVTITINAVDPVVGSRIYGWVYDEGKRYAGEEAARLLIDRQLAGLKMLASRGVLCKVNSVLIPEVNDAHLPEVARVVKEHGAVLHNIMPLIIAPGSRYEQEGMRAPRPRLVRQLQEQCAEAGAVIMRHCRQCRADAIGLLGEDRNQDFTWENIAAAPPMDEEARAQFQKELDEKVRVRMERKEGQSHHKQPSTGAGCSCPLSGDKPEASFTSKPVLIAVASRGGGKVNQHFGRAKEFMIYESDGTIVNFIGIRKVQSYCHGKADCNGDKAETIKEILSMVHDCALLLSSGIGEAPKEALQEAGVLPIVCGGDIEESVLEYVKFLRYMYPVQTGKGSKRNKGVKGNHSDLPIEHFGG

SEQ ID NO: 255 - protein, 302 aa, Methanococcus infernus
  PEPTIDE (1)..(302): NifF protein ;  proteinID: WP_013099970; GeneID:9131560
MEKMSKFSHLLKAHPCFNEKVHDKYGRVHLPVAPRCNIACKFCKRSVSKECCEHRPGVSLGVLKPEDVEDYLKKILKEMPNIKVVGIAGPGDSLFNKETFETLKIIDEKFPNLIKCISTNGLLLSKYYKDLANLNVRTITVTVNAIKPEILEKIVDWVYYDKKLYRGLEGAKLLIEKQIEGIKKASEEDFIIKINTVLIPEINMDHVVEIAKFFKDYAYVQNIIPLIPQYKMKELRAPTCEEIKKVRKECEKYIPQFRACGQCRADAVGLIKEKELLKEFFKEKNKEKNIKLEVFDLKHFSH

SEQ ID NO: 256 - protein, 323 aa, Methanococcus acetivorans
  PEPTIDE (1)..(323): NifF protein ;  proteinID: WP_011024080; GeneID:   1476089
MPEENQPIKEKNNGPILGEELLRKISEHPCYDKNAQHKYGRIHLAVAPACNIQCNFCVREFDCVNESRPGVTSKVLTPEEALEKTKQILAEYPFIKVVAIAGPGDPLANDETFETFELIRNEFPEITLCMSTNGLMLPEKLPEILRTGVSTLTVTVNAIDPEIQAKIVDHIFYHGKVYKGVEAAKIQIKNQLDGIKAAIDAGIVVKVNTVLIPGINDKHIIEIAKKLNELGVYIMNVMPLINQGAFADLEPPTPEERKAVQEACEPYVMQMRHCRQCRADAYGLLAQDMSQMSEERRKVIKIQTKEDMEKARAVLEKNGKKEA

SEQ ID NO: 257 - protein, 502 aa, Azotobacter vinelandii
  PEPTIDE (1)..(502): NifF protein ;  proteinID: P11067; GeneID:   13913210
MELSVLGQNNGGQHSAGGCSSSSCGSTHDQLSHLPENIRAKVQNHPCYSEEAHHYFARMHVAVAPACNIQCHYCNRKYDCANESRPGVVSEVLTPEQAVKKVKAVAAAIPQMSVLGIAGPGDPLANPKRTLDTFRMLSEQAPDMKLCVSTNGLALPECVEELAKHNIDHVTITINCVDPEIGAKIYPDLLEQQAHPRRQGRKILIEQQQKGLEMLVARGILVKVNSVMIPGVNDEHLKEVSKIVKAKGAFLHNVMPLIAEPEHGTFYGVMGQRSPEPEELQDLQDACAGDMNMMRHCRQCRADAVGMLGEDRGDEFTLDKIESMEIDYEAAMVKRAAIHAAIKEELDEKAAKKERLAGLSVASVQNGTSGRYRPVLMAVATSGGGLINQHFGHATEFLVYEASPSGVRFIGHRRVDQYCVGNDTCGEKESALAGSIRALKGCEAVLCSKIGFEPWSDLETAGIQPNGEHAMEPIEEAVMAVYREMIESGRLENDGALLQAKA

SEQ ID NO: 258 - protein, 490 aa, Rhizobium leguminosarum
  PEPTIDE (1)..(490): NifF protein ;  proteinID: ABM47405; GeneID:   ABM47405
MSRGMSKCRITNTAPSARGWKATTFGDYAFSSRGSSEPNAMAPAIIEQIKDHPCFSREAHLYFARMHLAVASACNIQCNYCNRKYDCANESRPGVASHRLTPDQALRRAIAVANEVPQLSVVGIAGPGDACYDWRKTKATLIPIAREIPDVKLCISTNGLALPEHVDDLVDMNVGHVTITINMVDPRIGTKIYPWIFYDGRRYNGIDASRILHERQMLGLEMLTERGILAKVNSVMIPGVNDEHLIEVNKWVKDRGAFMHNVMPLISERSHGTFYGLNDQRCPATSELIALRDRLEGGTQVMRHCHQCRADAVGLLGDDRAREFTLGQFPADETYDSAKRNAYRQLIERERRGQTLEESDAATPVSAPSDELLLIAVTTKGGGRVNGHFGHAQEIQIFSVCQKGNGLIGHLKIDPYCLGGWGEEATLNTIIDALKGLDVLICSEIGKSPKNKLARRGVRATGAYDGSYIEQAIGALYRAVLHNEALATAI

SEQ ID NO: 259 - protein, 472 aa, Thermocrinis albus
  PEPTIDE (1)..(472): NifF protein ;  proteinID: ADC89048.1; GeneID:   8813903
MSGCHSKQCGLGSDDLSFLPEDIRRKVENHPCYSQEAHHFYARMHVAVAPACNIQCNYCNRKYDCANESRPGVVSELLTPEEAAKKVLAVAMEIPQLTVVGIAGPGDPLANPERTFRTFELIKEKAPDIKLCLSTNGLVLDKYINKIKDLEIDHVTITINAVSVDTASKIYPWIFYNHRRYRDKEAAKILLEKQYEGLQACVENGILVKVNTVFVPEINGEEIPELSKKVRSMGAFLHNIMPYVEGEGTAFSKAGIRPPTPQELKEMQEKCEGNMNLMRHCRQCRADAIGLLGEDRGQEFTKDKLSKININYDPNWRKQIHEEIEKEREKLRKARELLFGETENEGPKVLVAVASKGNMLVNEHFGTAKEFLIYEVSAKGAKFIHHRKVTPYCHGSISCLEGENILEDTIAKLSDCKAIIAAKIGFEPRDVLKQRNIDCVDEFAYLSIDEALARYYKKYVLKEEVPVGTNGG

SEQ ID NO: 260 - protein, 510 aa, Frankia Alni
  PEPTIDE (1)..(510): NifF protein ;  proteinID: P46044; GeneID:  18991344
MTGEPAFAAAPAGGLPRRSAQAPASAGGCKTTTSCGTSAPVQDPEIAEKIANHPCYTAEAHQYYARMHVAVAPGCNIQCNFCNRKFDCANESRPGVTSTLLTPEDALAKVNVVASEIKQMSVLGIAGPGDPLANPKPTFRTIELVARDCPDIKLCLSTNGLRLPEFVDRIADLNVDHVTITINMIDPEVGERIYPWVAWRGKRYTGREASKILSEQQLAGLAALTERKILCKVNSVMIPGINDEHLVEVSRTVKGLGAFLHNVMPLVSAPEHGTVFGLTGQRGPTPQELKALQDRCEQDDGAEMNMMRHCRQCRADAVGLLGEDRGDDFLPETFQGREIVYDLAGRQQAHEEIERWRTEVAATRQTLNIATGARTPDVPAAEPVRPAEVVLVAVATKGSGVVNQHFGHAGEFWIYEAGPGWARLVQTRDVDRYCNGPSDCDEDASKLDRTIEMLSDCAAVLCSKIGLGPREALEEAGIEPVEIYDLIDKAVAEIGARLVTDRAPAEVGTP

SEQ ID NO: 261 - protein, 409 aa, Leptospirilum ferrodiazotrophum
  PEPTIDE (1)..(409): NifF protein ;  proteinID: BAM08074.1; GeneID:  12054741
MSSLLLRGEGGFFISHLGGILHFPLTKAAPDIKLCLSTNGLALPDMVDRIADYNVDHVTVTINMVDPEVGERIYPWIYFNKKRWKGRDAARILSERQLLGLEMLTARKILVKVNSVMIPGVNDEHLKAVNREVKKRGAFLHNIMPLISEPEHGTFYGLTGQRGPTAEELKHLQDSCEGEMNMMRHCRQCRADAVGLLGEDRSSEFTNEKIEAIEIADVSYDLSAREAYRDKVEETREKERKIKEMLAGLGRGKGLEEEAPVLVAVATAGEGLINQHFGHAREFQVYEVSATEAKFIGHRRVDLYCEGGYGEDDSLSRITEALSDCVGVMVAKVGGCPKKTLEEAGILPIDGYAYQSIKPSLLQWFSEYVEGIRSGKIVPKSSSGQTKIRSGAFTAPSPAPGQIPLAILK

SEQ ID NO: 262 - protein, 523 aa, Cupriavidus taiwanensis
  PEPTIDE (1)..(523): NifF protein ;  proteinID: WP_012354685; GeneID:  29763670
MRNRACTRPSAACFEGGEKVVPLMPTSRTSALRGEGTPSVGASVLKCESPGEAEGMRPGVWDKIKDHPCYSEEAHHHYARMHVAVAPACNIQCNYCNRKYDCSNESRPGVTSRKLTPEQAVKKVMVVASRIPQLTVVGVAGPGDSLASPGTTFETFRLLKERVPDVKLCLSTNGLALPDFVDDICRYNIDHVTITINMIDPVVGARIYPWIFWNRRRLTGTDAACVLHERQMQGLEMLTERGVLTKINSVLIPGINDKHLIEVNRAVKQRGAFLHNIMPLISDPSHGTYFGLHGPRGPTSRELRTVQEACSGGLKLMRHCRQCRADAVGLLDEDRGAEFSLESIEQMDIGYDRNIRQEYQFRTETELMAQREAKREVPALTKVRKATGALKVNIAVATKGRGRVNGHFGNISELKIFEVSASGAHFVGYRRVELYCQGGYGDDERLVRIIRAINDCHAIFVAKIGICPRKELADAGIESVEQYAGEIVEVAARSWFNDYSSRVAGGGSLRKHCDETHDQAKDV

SEQ ID NO: 263 - protein, 288 aa, Paenibacillus polymyxa
  PEPTIDE (1)..(288): NifH protein ;  proteinID: WP_010877473; GeneID:  1470956
MRQIAFYGKGGIGKSTTSQNTLAQLATKFKQKIMIVGCDPKADSTRLILNTKAQQTVLHLAAERGTVEDLELEDVVQKGFGDILNVECGGPEPGVGCAGRGIITAINFLEEEGAYEGLDFVSYDVLGDVVCGGFAMPIREKKAQEIYIVCSGEMMAMYAANNIARGILKYANSGGVRLGGLICNSRNTDLEAELITELARRLNTQMIHFLPRDNVVQHAELRRMTVTQYNPEHKQAAEYEELAGKILNNDMLTVPTPISMEDLEDLLMEFGIIEDEETAINKAEASGQ

SEQ ID NO: 264 - protein, 482 aa, Paenibacillus polymyxa
  PEPTIDE (1)..(482): NifD protein ;  proteinID: AHC18646.1; GeneID:  17918480
MSSIVDKGKQIVEEILEVYPKKAKKDRTKHFEIADEELVNCGTCSIKSNMKSRPGVMTARGCAYAGSKGVVWGPIKDMVHISHGPIGCGQYSWGTRRNYANGVLGIDNFTAMQITSNFQEKDIVFGGDKKLEVICREIKEMFPLAKGISVQSECPVGLIGDDIGAVAKKMTEELGIPVIPVRCEGFRGVSQSLGHHIANDAIRDFLMGRRELKESGPYDVSIIGDYNIGGDAWASRILLEEMGLRVIAQWSGDGTINELGIAHKSKLNLIHCHRSMNYMCTTMEQEYGIPWMEYNFFGPTKTMESLRAIAARFDETIQEKCEQVIAQFMPQMEAVIRKYRPRLEGKKVMLLIGGLRARHTIGAYEDLGMEIVATGYEFAHKDDYEKTFPDVKEGTILYDDPTAYELEELAQRLNIDLMGAGVKEKYVYHKMGIPFRQMHSWDYSGPYHGFDGFKIFARDMDMTINSPVWSLLPSRQTAEVPV

SEQ ID NO: 265 - protein, 509 aa, Paenibacillus polymyxa
  PEPTIDE (1)..(509): NifD protein ;  proteinID: AHC18647.1; GeneID:  17918481
MSERLNIVDHNQLFRQDKYVRQREEKRAFEAPCSPEEVTATLEYTKTKEYKDKNFARTAVVVNPAKACQPLGAVMAALGFEKTLPFIHGSQGCTAYFRSHLARHFKEPVPAVSTSMTEDAAVFGGMRNLIDGIENCIALYQPEMIAVCTTCMAEVIGDDLSAFLANARQEGALPEDMPVPFANTPSFSGSHITGYDAMLRSVLETLYNKSGRTPQPGHELKLNVLLGFDGYTGNFAEMRRILGMFGATYTILGDHSSNFDSGATGEYSYYYGGTPLKDVPEAADAAGTLAIQQYSLRKTLGYMKRTWGQQVSSISTPLGIRATDCLLEEISRLSGKEIPEALKQERARIVDAMMDSHAYLHGKRVAMAGDPDMLIGLIGFCLELGMEPVHIVCSNGDRKFEKEAELLLKSSPYGAEATVHSGQDLWHMRSLLFQDPVDLAIGSSHLKFAAKEAKIPLLRVGFPIFDRHHLHRYPIIGYQGALNLLTQFVNTVLDVMEEQAPDHSFDLVR

SEQ ID NO: 266 - protein, 453 aa, Paenibacillus polymyxa
  PEPTIDE (1)..(453): NifD protein ;  proteinID: AHC18648.11; GeneID:  17918482
  PEPTIDE (1)..(453): NifD protein ;  proteinID: AHC18648.1; GeneID:  17918482
MEPAVSNGRLEVSCGNKIPKSTPCPRPVPGEASGGCSFDGAQITLIPIADAAHLVHGPIACLGNSWESRGSLSSGPELSAYGFTTDLGEQDIIFGSEQKLHESIRYIVSRFAPPAVFVYTTCVTALTGEDIEGVCKAESERLGTPIIPVNSPGFVGSKNLGTRLAGDVLFQHIIGSTEPEQTTSHDINLIGEYNIAGEMWHIERLMQQAGMSILSRITGDGRFREVGWAHRAKANMVVCSRALLGLAVQMERKYGIPYFEGSFYGAKETSYSLRQMAYLTGDRDVERRVDKLAAREEMRLSLELEPYRKQLKGKRAVLYTGGVKSWSVITALQELGIKVVGVGTNKSTAEDVSRIADRIGDDAEYIPEGGARQILKTVRSRKADMVIAGGRNMYMALKEQIPFVDINQERHKAYAGYDGLLSLAKQLVHTLQHPVWELTAKLAPWEEETEFAD

SEQ ID NO: 267 - protein, 435 aa, Paenibacillus polymyxa
  PEPTIDE (1)..(435): NifN protein ;  proteinID: AHC18649.1; GeneID:  17918483
MPIKSATKPVSVNPLKVGQPLGGVLALQGMYRSMPLLHGAQGCSAFSKALLTRHFREPIAVQTSALQEMDVIFDADRNLEEALDHIWSKHHPDVIGVISTALTEVAGVDFQSRVKAFKRERALKESLLFSVSLPDFHGSLETGYSSTVESLIDAVLGLAGGKSPKKQRRTQVNLLPASYLTAGDVMEIKDIIASFGLEVITLPDISTSLSGHLLTGFSPLTRGGTPLDSACQMLESSCTIAIGASMERPARRLDHAAGIPYHLFAGLSGLTASDAFIHFLQKISREPAPVRFRWQRENLLDSMLDAHFYYSGASAVVALEPDHMLSTAAWLEEMGVELKRLITPCSTPALQKTEREVWIGDLDDAEESAQGVDLWISNSHGRKGAARAGASFVPAGLPVYDELGAHTSVSVGYRGTMEWVNKVGNVLLTERGRGG

SEQ ID NO: 268 - protein, 129 aa, Paenibacillus polymyxa
  PEPTIDE (1)..(129): NifX protein ;  proteinID: AHC18650.1; GeneID:  17918484
MKVAFATEDGVHVNAHFGQSPMFTVFEIRHSGVQFLEHRRIALGSDENEAGKIASRIGLIEDCALIFLVQIGASAAAQVTKRTIMPVKVAFGSTIEEQVQRLQNMLARNPPMWLAKILHAEEGSGKAES

SEQ ID NO: 269 - protein, 378 aa, Paenibacillus polymyxa
  PEPTIDE (1)..(378): NifV protein ;  proteinID: AET59376.1; GeneID:  11584365
MSRLHICDTTLRDGEQAPGVAFSAEEKTEIAIMLDSAGVEQAEIGIPAMGKTECRSIARIAALGLQMKLMTWNRAVFTDIDATESTGVGWAHISVPVSTVQMKSKLGMNPEQVTELIRKSVDYALCKGLTVSVGFEDASRADDLFLEQLANQLYRDGIRRFRYADTLSVHHPAAIAARIDRLVSRVPQDVELEIHCHNDYGLALANTLAALQAGAVWASTTVSGLGERAGNTALEEVVMSWRDLYQGTCSVRPELLNPLAALVSKASNRIIPEGKPIVGDMVFAHESGIHINGLLKERAAYQALDPTELGTDHSFVLGKHSGRSAVQYMLEQEGIEAGSGEIKFLLERLRLVGEDPKRVIHSADLRRWLQYYPAELPK

SEQ ID NO: 270 - protein, 254 aa, Paenibacillus polymyxa
  PEPTIDE (1)..(254): HesA protein ;  proteinID: AHC18651.1; GeneID:  17918485
MVQLLEDSRYGRELKLLGVEGQNRLKQATVMVAGIGGLGGTAAMYLAAAGVGKLILAHEGVIHLPDMNRQVLMDSGRIGEERMETALQHLHRINPETQLEGHADRITEESSRPWVEAADIVIDARYDFPERYALNRLCVRHGRPMIEAAMYAYEVSLMTIDPGRTACLECLYPEGGQPWEPLGFPVLGATSGLIGCMAALEAVKWITDAGNLFTDRMYRMNVLDMSSCTIAVKRNPRCPCCGTGGNTDESIAYL

SEQ ID NO: 271 - DNA, 1350 bp, Pseudomonas pudita
  CDS (1)..(1350): NdoB Gene encoding naphthalene 1,2-dioxygenase
atgaactacaacaataaaatcttagtttcagaatcagggctgagtcaaaagcatcttattcacggtgacgaagagcttttccagcacgaactgaaaaccatttttgcacgtaactggttattccttactcacgattcgttgattcccgctccgggcgattatgttacggctaaaatgggaatcgatgaggtgattgtatcgcgccaaaacgacggcagtattcgtgcattccttaacgtctgccgtcaccgcggcaagactcttgtatctgtcgaggcgggcaatgcgaaaggatttgtttgtagctaccacgggtggggttttggttctaatggcgaattgcagtccgtaccatttgaaaaagatttgtatggtgaatccttaaacaagaagtgcttgggattgaaagaagtagcgcgcgtcgaatcatttcatggatttatttatgggtgcttcgatcaagaagcccctcctttaatggactacttgggagatgcagcctggtaccttgagccgatgttcaagcacagcggagggcttgagttggttggtccaccgggaaaagttgttatcaaggccaactggaaggcaccagctgagaacttcgttggcgacgcttaccacgtaggctggacacacgcatcttcattgcgcagcggcgagtcgattttctcctcacttgcgggaaacgcggccttgcctccagaaggcgccggtttgcagatgacctcgaagtatggctctggaatgggcgttttgtgggacggctattctggcgtccattctgcggacctggtgccggaactgatggcctttgggggtgctaagcaggagcgtcttaacaaagagatcggcgacgtccgtgcacgcatctatcgctcccatttaaattgcacggtcttccccaataactcaatgttgacgtgtagcggggtcttcaaagtgtggaaccctatcgatgcaaacacgactgaggtgtggacatacgccatcgtcgagaaagacatgcctgaggatctgaagcgccgtttggcagattcggtccaacgcacgtttggacccgcgggtttctgggaatcggacgacaacgataacatggagactgcctctcaaaacggcaagaaatatcaatctcgtgattccgacctgttgagcaacctgggatttggagaggatgtttatggtgatgcggtttatcctggtgtcgtggggaagtccgccattggagagacttcttatcgtggtttttaccgtgcctaccaggcccacgtatcctcatcgaattgggcggaatttgaacacgcgtcgtcaacgtggcataccgagcttaccaagaccaccgatcgttaa

SEQ ID NO: 272 - protein, 449 aa, Pseudomonas pudita
MNYNNKILVSESGLSQKHLIHGDEELFQHELKTIFARNWLFLTHDSLIPAPGDYVTAKMGIDEVIVSRQNDGSIRAFLNVCRHRGKTLVSVEAGNAKGFVCSYHGWGFGSNGELQSVPFEKDLYGESLNKKCLGLKEVARVESFHGFIYGCFDQEAPPLMDYLGDAAWYLEPMFKHSGGLELVGPPGKVVIKANWKAPAENFVGDAYHVGWTHASSLRSGESIFSSLAGNAALPPEGAGLQMTSKYGSGMGVLWDGYSGVHSADLVPELMAFGGAKQERLNKEIGDVRARIYRSHLNCTVFPNNSMLTCSGVFKVWNPIDANTTEVWTYAIVEKDMPEDLKRRLADSVQRTFGPAGFWESDDNDNMETASQNGKKYQSRDSDLLSNLGFGEDVYGDAVYPGVVGKSAIGETSYRGFYRAYQAHVSSSNWAEFEHASSTWHTELTKTTDR

SEQ ID NO: 273 - DNA, 585 bp, Pseudomonas pudita
  CDS (1)..(585): NdoC gene encoding naphthalene 1,2-dioxygenase
atgatgattaacatccaagaggacaagctggtatcggcacacgacgccgaggagattttacgctttttcaattgccacgatagcgcgctgcagcaggaagcgacgaccttgttaacgcaagaggcgcacctgcttgacatccaggcttatcgtgcgtggctggaacattgtgttgggagcgaagttcaatatcaagttatctcacgcgagcttcgcgccgcatcagaacgccgttacaaactgaacgaagctatgaacgtctataatgagaactttcaacagcttaaggttcgcgttgaacatcagcttgatcctcagaattgggggaactcaccgaaattgcgctttacccgtttcatcacaaacgttcaggccgcaatggatgtcaatgacaaggaattgctgcacattcgcagtaacgtgattttacaccgtgcccgtcgtggcaatcaggtcgacgtattctacgctgcccgtgaggacaagtggaaacgcggggaggggggagttcgtaagctggtacagcgctttgtagactatcccgagcgtatcttacagacccataatttaatggtcttcttgtga

SEQ ID NO: 274 - protein, 194 aa, Pseudomonas pudita
MMINIQEDKLVSAHDAEEILRFFNCHDSALQQEATTLLTQEAHLLDIQAYRAWLEHCVGSEVQYQVISRELRAASERRYKLNEAMNVYNENFQQLKVRVEHQLDPQNWGNSPKLRFTRFITNVQAAMDVNDKELLHIRSNVILHRARRGNQVDVFYAAREDKWKRGEGGVRKLVQRFVDYPERILQTHNLMVFL

SEQ ID NO: 275 - DNA, 987 bp, Pseudomonas pudita
  CDS (1)..(987): NdoR gene encoding ferredoxin-NAD(P)+ reductase
atggaactgctgatccaaccgaataatcgcattatccccttttctgctggggctaaccttcttgaagtgctgcgtgaaaatggggtggcgattagttatagttgtcttagtgggcgctgcgggacctgccgttgccgcgttattgacggctctgtaatcgattcaggtgcggaaaacggacagagcaaccttaccgataagcagtacgtcttagcgtgtcaatccgtactgacgggcaattgtgcgattgaagttcctgaggctgatgaaatcgttactcatccggcacgtattatcaagggaaccgtagtggcagtcgaatctcctactcatgacatccgccgtcttcgcgttcgcttgtcaaagccttttgagttctcgcctggacagtatgctacgttacagttctcacccgaacacgcgcgcccatacagcatggcaggtttgccggacgatcaagaaatggagttccacattcgtaaagtaccgggcggccgcgttactgaatatgtttttgaacacgtccgcgaaggaacgtccattaaattgtcaggaccgctgggtaccgcctaccttcgccaaaaacataccggacctatgttgtgcgtgggtggaggcaccggcttagctcccgtgttatcaattgttcgcggagcccttaaatccggtatgaccaatcccattttattgtattttggcgtccgctcgcaacaggacttgtatgacgctgaacgccttcacaaactggctgctgatcatcctcagttgactgtgcataccgtgatcgctacaggacctatcaatgaaggccagcgtgctgggcttatcaccgacgttattgagaaggatattttgtccctggcaggttggcgtgcttatttgtgcggtgctccggctatggtggaggctctttgtaccgttactaagcacttggggatctctccggaacatatctatgcagatgcgttttatccaggtggtatttga

SEQ ID NO: 276 - protein, 328 aa, Pseudomonas pudita
MELLIQPNNRIIPFSAGANLLEVLRENGVAISYSCLSGRCGTCRCRVIDGSVIDSGAENGQSNLTDKQYVLACQSVLTGNCAIEVPEADEIVTHPARIIKGTVVAVESPTHDIRRLRVRLSKPFEFSPGQYATLQFSPEHARPYSMAGLPDDQEMEFHIRKVPGGRVTEYVFEHVREGTSIKLSGPLGTAYLRQKHTGPMLCVGGGTGLAPVLSIVRGALKSGMTNPILLYFGVRSQQDLYDAERLHKLAADHPQLTVHTVIATGPINEGQRAGLITDVIEKDILSLAGWRAYLCGAPAMVEALCTVTKHLGISPEHIYADAFYPGGI

SEQ ID NO: 277 - DNA, 315 bp, Pseudomonas pudita
  CDS (1)..(315): NdoA gene encoding ferredoxin-NAD(P)+ reductase
atgaccgtcaaatggattgaagcggtcgcgctttcagatatcctggaaggtgacgttttaggtgttacggtggaagggaaggaactggcgctgtacgaagtcgagggggaaatttacgccacagacaacctgtgcacgcatgggtctgctcgtatgtccgacgggtatcttgaggggcgtgaaatcgagtgtccgctgcatcagggccgctttgacgtttgcactggtaaggcgttgtgtgcccccgttacgcaaaatatcaaaacatatcccgtcaagatcgagaatctgcgtgtaatgatcgacctttcgtaa

SEQ ID NO: 278 - protein, 104 aa, Pseudomonas pudita
MTVKWIEAVALSDILEGDVLGVTVEGKELALYEVEGEIYATDNLCTHGSARMSDGYLEGREIECPLHQGRFDVCTGKALCAPVTQNIKTYPVKIENLRVMIDLS

SEQ ID NO: 279 - DNA, 17 bp, Artificial Sequence
  RBS (1)..(17): dxs wild-type RBS
ttaataggcccctgatg

SEQ ID NO: 280 - DNA, 17 bp, Artificial Sequence
  RBS (1)..(17): Optimised dxs RBS
tagagaagagactgatg

SEQ ID NO: 281 - DNA, 17 bp, Artificial Sequence
  RBS (1)..(17): rpoS wild-type RBS
gtaggagccaccttatg

SEQ ID NO: 282 - DNA, 17 bp, Artificial Sequence
  RBS (1)..(17): Optimised rpoS RBS
gagaggatggacttatg

SEQ ID NO: 283 - DNA, 17 bp, Artificial Sequence
  RBS (1)..(17): idi wild-type RBS
acatgtgagaaattatg

SEQ ID NO: 284 - DNA, 17 bp, Artificial Sequence
  RBS (1)..(17): Optimised idi RBS
aaaagaggttgattatg

SEQ ID NO: 285 - DNA, 17 bp, Artificial Sequence
  RBS (1)..(17): dxr wild-type RBS
actctggatgtttcatg

SEQ ID NO: 286 - DNA, 17 bp, Artificial Sequence
  RBS (1)..(17): Optimised dxr RBS
ttaagggtgtattcatg
